(19) United States
(12) Patent Application Publication
(10) Pub. No.: US 2022/0112503 A1
(43) Pub. Date: Apr. 14, 2022

(54) COMPOUNDS AND METHODS FOR REDUCING PMP22 EXPRESSION

(71) Applicant: Ionis Pharmaceuticals, Inc., Carlsbad, CA (US)

(72) Inventors: Huynh-Hoa Bui, San Diego, CA (US); Susan M. Freier, San Diego, CA (US); Hien Thuy Zhao, San Diego, CA (US); Priyam Singh, San Diego, CA (US)

(73) Assignee: Ionis Pharmaceuticals, Inc., Carlsbad, CA (US)

(21) Appl. No.: 17/416,392

(22) PCT Filed: Dec. 20, 2019
(86) PCT No.: PCT/US2019/068040

§ 371 Date: Jun. 18, 2021

Related U.S. Application Data
(60) Provisional application No. 62/783,997, filed on Dec. 21, 2018.

(51) Int. Cl. C12N 15/113; A61P 25/28

(52) U.S. Cl. CPC C12N 15/1138; A61P 25/28; C12N 2310/3181; C12N 2310/3233; C12N 2310/321; C12N 2310/11

(57) ABSTRACT

Provided are compounds, methods, and pharmaceutical compositions for reducing the amount or activity of PMP22 RNA in a cell or animal, and in certain instances reducing the amount of PMP22 protein in a cell or animal. Such compounds, methods, and pharmaceutical compositions are useful to ameliorate at least one symptom or hallmark of a neurodegenerative disease. Such symptoms and hallmarks include demyelination, progressive axonal damage and/or loss, weakness and wasting of foot and lower leg muscles, foot deformities, and weakness and atrophy in the hands. Such neurodegenerative diseases include Charcot-Marie-Tooth disease.

### SEQUENCE LISTING

[0001] The present application is being filed along with a Sequence Listing in electronic format. The Sequence Listing is provided as a file entitled BIOL0347WOSEQ_ST25.txt, created on Dec. 19, 2019, which is 1.10 MB in size. The information in the electronic format of the sequence listing is incorporated herein by reference in its entirety.

### FIELD

[0002] Provided are compounds, methods, and pharmaceutical compositions for reducing the amount or activity of PMP22 RNA in a cell or animal, and in certain instances reducing the amount of PMP22 protein in a cell or animal. Such compounds, methods, and pharmaceutical compositions are useful to ameliorate at least one symptom or hallmark of a neurodegenerative disease. Such symptoms and hallmarks include demyelination, progressive axonal damage and/or loss, weakness and wasting of foot and lower leg muscles, foot deformities, and weakness and atrophy in the hands. Such neurodegenerative diseases include Charcot-Marie-Tooth disease, Charcot-Marie-Tooth disease type 1A, Charcot-Marie-Tooth disease type 1E, and Dejerine Sottas Syndrome.

### BACKGROUND

[0003] Charcot-Marie-Tooth disease (CMT) is one of the most common inherited neurological disorders, affecting approximately 1 in 2,500 people in the United States. CMT, also known as hereditary motor and sensory neuropathy (HMSN) or peroneal muscular atrophy, comprises a group of disorders that affect peripheral nerves. Charcot-Marie-Tooth disease type 1A (CMT1A) is an inherited neurodegenerative disease caused by duplication of the PMP22 gene. It is the most common inherited peripheral neuropathy and is characterized by progressive distal motor weakness. Symptoms are caused by progressive demyelination of peripheral neurons, followed by axonal dysfunction and/or degeneration (Krajewski, et. al, “Neurological dysfunction and axonal degeneration in Charcot-Marie-Tooth disease type 1A”, Brain, 2000, 123(Pt.7):1516-1527). Symptoms include weakness and wasting of foot and lower leg muscles, foot deformities, and weakness and atrophy in the hands. Additionally, myelin deficits can be detected by electrophysiology, and often appear years before symptom onset (Kim, et al., “Comparison between Clinical Disabilities and Electrophysiological Values in Charcot-Marie-Tooth 1A Patients with PMP22 Duplication”, J. Clin. Neuro., 2012, 8(2):139-145). Charcot-Marie-Tooth disease type 1E (CMT1E) and Dejerine-Sottas Syndrome are inherited neurodegenerative diseases caused by mutations in the PMP22 gene. Symptoms include impaired motor development, distal muscle weakness, foot deformities, and a loss of deep tendon reflex (Li, et al., “The PMP22 Gene and Its Related Diseases”, Mol. Neurobiol., 2013, 47(2): 673-698).

[0004] Currently there is a lack of acceptable options for treating neurodegenerative diseases such as CMT disease, CMT1A, CMT1E, and Dejerine-Sottas Syndrome. It is therefore an object herein to provide compounds, methods, and pharmaceutical compositions for the treatment of such diseases.

### SUMMARY OF THE INVENTION

[0005] Provided herein are compounds, methods and pharmaceutical compositions for reducing the amount or activity of PMP22 RNA, and in certain embodiments reducing the amount of PMP22 protein in a cell or animal. In certain embodiments, the animal has a neurodegenerative disease. In certain embodiments, the animal has Charcot-Marie-Tooth disease. In certain embodiments, the animal has Charcot-Marie-Tooth disease type 1A (CMT1A). In certain embodiments, the animal has Charcot-Marie-Tooth disease type 1E (CMT1E). In certain embodiments, the animal has Dejerine-Sottas Syndrome. In certain embodiments, compounds useful for reducing expression of PMP22 RNA are oligomeric compounds. In certain embodiments, compounds useful for reducing expression of PMP22 RNA are modified oligonucleotides.

[0006] Also provided are methods useful for ameliorating at least one symptom or hallmark of a neurodegenerative disease. In certain embodiments, the neurodegenerative disease is Charcot-Marie-Tooth disease. In certain embodiments, the neurodegenerative disease is CMT1A. In certain embodiments, the neurodegenerative disease is CMT1E. In certain embodiments, the neurodegenerative disease is Dejerine-Sottas Syndrome. In certain embodiments, the symptom or hallmark includes demyelination, progressive axonal damage and/or loss, weakness and wasting of foot and lower leg muscles, foot deformities, and weakness and atrophy in the hands.

### DETAILED DESCRIPTION OF THE INVENTION

[0007] It is to be understood that both the foregoing general description and the following detailed description are exemplary and explanatory only and are not restrictive. Herein, the use of the singular includes the plural unless specifically stated otherwise. As used herein, the use of “or” means “and/or” unless stated otherwise. Furthermore, the use of the term “including” as well as other forms, such as “includes” and “included”, is not limiting. Also, terms such as “element” or “component” encompass both elements and components comprising one unit and elements and components that comprise more than one subunit, unless specifically stated otherwise.

[0008] The section headings used herein are for organizational purposes only and are not to be construed as limiting the subject matter described. All documents, or portions of documents, cited in this application, including, but not limited to, patents, patent applications, articles, books, and treatises, are hereby expressly incorporated-by-reference for the portions of the document discussed herein, as well as in their entirety.

### Definitions

[0009] Unless specific definitions are provided, the nomenclature used in connection with, and the procedures and techniques of, analytical chemistry, synthetic organic chemistry, and medicinal and pharmaceutical chemistry described herein are those well-known and commonly used in the art. Where permitted, all patents, applications, published applications and other publications and other data referred to throughout in the disclosure are incorporated by reference herein in their entirety.

[0010] Unless otherwise indicated, the following terms have the following meanings:

### Definitions

[0011] As used herein, “2′-deoxynucleoside” means a nucleoside comprising a 2′-H(H) deoxyribosyl sugar moiety. In certain embodiments, a 2′-deoxynucleoside is a 2′-β-D-deoxynucleoside and comprises a 2′-β-D-deoxyribosyl sugar moiety, which has the β-D configuration as found in naturally occurring deoxyribonucleic acids (DNA). In certain embodiments, a 2′-deoxynucleoside or a nucleoside comprising an unmodified 2′-deoxyribosyl sugar moiety may comprise a modified nucleobase or may comprise an RNA nucleobase (uracil).

[0012] As used herein, “2′-substituted nucleoside” means a nucleoside comprising a 2′-substituted sugar moiety. As used herein, “2′-substituted” in reference to a sugar moiety means a sugar moiety comprising at least one 2′-substituent group other than H or OH.

[0013] As used herein, “5-methyl cytosine” means a cytosine modified with a methyl group attached to the 5 position. A 5-methyl cytosine is a modified nucleobase.

[0014] As used herein, “administering” means providing a pharmaceutical agent to an animal.

[0015] As used herein, “animal” means a human or non-human animal.

[0016] As used herein, “antisense activity” means any detectable and/or measurable change attributable to the hybridization of an antisense compound to its target nucleic acid. In certain embodiments, antisense activity is a decrease in the amount or expression of a target nucleic acid or protein encoded by such target nucleic acid compared to target nucleic acid levels or target protein levels in the absence of the antisense compound.

[0017] As used herein, “antisense compound” means an oligomeric compound capable of achieving at least one antisense activity.

[0018] As used herein, “ameliorate” in reference to a treatment means improvement in at least one symptom relative to the same symptom in the absence of the treatment. In certain embodiments, amelioration is the reduction in the severity or frequency of a symptom or the delayed onset or slowing of progression in the severity or frequency of a symptom. In certain embodiments, the symptom or hallmark is demyelination, progressive axonal damage and/or loss, weakness and wasting of foot and lower leg muscles, foot deformities, and weakness and atrophy in the hands.

[0019] As used herein, “bicyclic nucleoside” or “BNA” means a nucleoside comprising a bicyclic sugar moiety.

[0020] As used herein, “bicyclic sugar” or “bicyclic sugar moiety” means a modified sugar moiety comprising two rings, wherein the second ring is formed via a bridge connecting two of the atoms in the first ring thereby forming a bicyclic structure. In certain embodiments, the first ring of the bicyclic sugar moiety is a furanosyl moiety. In certain embodiments, the bicyclic sugar moiety does not comprise a furanosyl moiety.

[0021] As used herein, “cleavable moiety” means a bond or group of atoms that is cleaved under physiological conditions, for example, inside a cell, an animal, or a human.

[0022] As used herein, “complementary” in reference to an oligonucleotide means that at least 70% of the nucleobases of the oligonucleotide or one or more regions thereof and the nucleobases of another nucleic acid or one or more regions thereof are capable of hydrogen bonding with one another when the nucleobase sequence of the oligonucleotide and the other nucleic acid are aligned in opposing directions. Complementary nucleobases means nucleobases that are capable of forming hydrogen bonds with one another. Complementary nucleobase pairs include adenine (A) and thymine (T), adenine (A) and uracil (U), cytosine (C) and guanine (G), 5-methyl cytosine (mC) and guanine (G). Complementary oligonucleotides and/or nucleic acids need not have nucleobase complementarity at each nucleoside. Rather, some mismatches are tolerated. As used herein, “fully complementary” or “100% complementary” in reference to oligonucleotides means that oligonucleotides are complementary to another oligonucleotide or nucleic acid at each nucleoside of the oligonucleotide.

[0023] As used herein, “conjugate group” means a group of atoms that is directly attached to an oligonucleotide. Conjugate groups include a conjugate moiety and a conjugate linker that attaches the conjugate moiety to the oligonucleotide.

[0024] As used herein, “conjugate linker” means a single bond or a group of atoms comprising at least one bond that connects a conjugate moiety to an oligonucleotide.

[0025] As used herein, “conjugate moiety” means a group of atoms that is attached to an oligonucleotide via a conjugate linker.

[0026] As used herein, “contiguous” in the context of an oligonucleotide refers to nucleosides, nucleobases, sugar moieties, or internucleoside linkages that are immediately adjacent to each other. For example, “contiguous nucleobases” means nucleobases that are immediately adjacent to each other in a sequence.

[0027] As used herein, “constrained ethyl” or “cEt” or “cEt modified sugar moiety” means a β-D ribosyl bicyclic sugar moiety wherein the second ring of the bicyclic sugar is formed via a bridge connecting the 4′-carbon and the 2′-carbon of the β-D ribosyl sugar moiety, wherein the bridge has the formula 4′-CH(CH₃)—O-2′, and wherein the methyl group of the bridge is in the S configuration.

[0028] As used herein, “cEt nucleoside” means a nucleoside comprising a cEt modified sugar moiety.

[0029] As used herein, “chirally enriched population” means a plurality of molecules of identical molecular formula, wherein the number or percentage of molecules within the population that contain a particular stereochemical configuration at a particular chiral center is greater than the number or percentage of molecules expected to contain the same particular stereochemical configuration at the same particular chiral center within the population if the particular chiral center were stereorandom. Chirally enriched populations of molecules having multiple chiral centers within each molecule may contain one or more stereorandom chiral centers. In certain embodiments, the molecules are modified oligonucleotides. In certain embodiments, the molecules are compounds comprising modified oligonucleotides.

[0030] As used herein, “gapmer” means a modified oligonucleotide comprising an internal region having a plurality of nucleosides that support RNase H cleavage positioned between external regions having one or more nucleosides, wherein the nucleosides comprising the internal region are chemically distinct from the nucleoside or nucleosides comprising the external regions. The internal region may be referred to as the “gap” and the external regions may be referred to as the “wings.” Unless otherwise indicated, “gapmer” refers to a sugar motif. Unless otherwise indicated, the sugar moiety of each nucleosides of the gap is a 2′-β-D-deoxyribosyl sugar moiety. Thus, the term “cEt gapmer” indicates a gapmer having a gap comprising 2′-β-D-deoxynucleosides and wings comprising cEt nucleosides. Unless otherwise indicated, a cEt gapmer may comprise one or more modified internucleoside linkages and/or modified nucleobases and such modifications do not necessarily follow the gapmer pattern of the sugar modifications.

[0031] As used herein, “hotspot region” is a range of nucleobases on a target nucleic acid that is amenable to oligomeric compound-mediated reduction of the amount or activity of the target nucleic acid.

[0032] As used herein, “hybridization” means the pairing or annealing of complementary oligonucleotides and/or nucleic acids. While not limited to a particular mechanism, the most common mechanism of hybridization involves hydrogen bonding, which may be Watson-Crick, Hoogsteen or reversed Hoogsteen hydrogen bonding, between complementary nucleobases.

[0033] As used herein, the term “internucleoside linkage” is the covalent linkage between adjacent nucleosides in an oligonucleotide. As used herein “modified internucleoside linkage” means any internucleoside linkage other than a phosphodiester internucleoside linkage. “Phosphorothioate internucleoside linkage” is a modified internucleoside linkage in which one of the non-bridging oxygen atoms of a phosphodiester internucleoside linkage is replaced with a sulfur atom.

[0034] As used herein, “linker-nucleoside” means a nucleoside that links, either directly or indirectly, an oligonucleotide to a conjugate moiety. Linker-nucleosides are located within the conjugate linker of an oligomeric compound. Linker-nucleosides are not considered part of the oligonucleotide portion of an oligomeric compound even if they are contiguous with the oligonucleotide.

[0035] As used herein, “non-bicyclic modified sugar moiety” means a modified sugar moiety that comprises a modification, such as a substituent, that does not form a bridge between two atoms of the sugar to form a second ring.

[0036] As used herein, “mismatch” or “non-complementary” means a nucleobase of a first oligonucleotide that is not complementary with the corresponding nucleobase of a second oligonucleotide or target nucleic acid when the first and second oligonucleotide are aligned.

[0037] As used herein, “MOE” means methoxyethyl. “2′-MOE” or “2′-MOE modified sugar” means a 2′-OCH₂CH₂OCH₃ group in place of the 2′—OH group of a ribosyl sugar moiety. As used herein, “2′-MOE nucleoside” means a nucleoside comprising a 2′-MOE sugar moiety.

[0038] As used herein, “motif” means the pattern of and/or modified sugar moieties, nucleobases, and/or internucleoside linkages, in an oligonucleotide.

[0039] As used herein, “neurodegenerative disease” means a condition marked by progressive loss of function or structure, including loss of motor function and death of neurons. In certain embodiments, the neurodegenerative disease is Charcot-Marie-Tooth disease. In certain embodiments, the neurodegenerative disease is CMT1A. In certain embodiments, the neurodegenerative disease is CMT1E. In certain embodiments, the disease is Dejerine-Sottas Syndrome.

[0040] As used herein, “nucleobase” means an unmodified nucleobase or a modified nucleobase. As used herein an “unmodified nucleobase” is adenine (A), thymine (T), cytosine (C), uracil (U), or guanine (G). As used herein, a “modified nucleobase” is a group of atoms other than unmodified A, T, C, U, or G capable of pairing with at least one unmodified nucleobase. A “5-methyl cytosine” is a modified nucleobase. A universal base is a modified nucleobase that can pair with any one of the five unmodified nucleobases. As used herein, “nucleobase sequence” means the order of contiguous nucleobases in a nucleic acid or oligonucleotide independent of any sugar or internucleoside linkage modification.

[0041] As used herein, “nucleoside” means a compound comprising a nucleobase and a sugar moiety. The nucleobase and sugar moiety are each, independently, unmodified or modified. As used herein, “modified nucleoside” means a nucleoside comprising a modified nucleobase and/or a modified sugar moiety. Modified nucleosides include abasic nucleosides, which lack a nucleobase. “Linked nucleosides” are nucleosides that are connected in a contiguous sequence (i.e., no additional nucleosides are presented between those that are linked).

[0042] As used herein, “oligomeric compound” means an oligonucleotide and optionally one or more additional features, such as a conjugate group or terminal group. An oligomeric compound may be paired with a second oligomeric compound that is complementary to the first oligomeric compound or may be unpaired. A “singled-stranded oligomeric compound” is an unpaired oligomeric compound. The term “oligomeric duplex” means a duplex formed by two oligomeric compounds having complementary nucleobase sequences. Each oligomeric compound of an oligomeric duplex may be referred to as a “duplexed oligomeric compound.”

[0043] As used herein, “oligonucleotide” means a strand of linked nucleosides connected via internucleoside linkages, wherein each nucleoside and internucleoside linkage may be modified or unmodified. Unless otherwise indicated, oligonucleotides consist of 8-50 linked nucleosides. As used herein, “modified oligonucleotide” means an oligonucleotide, wherein at least one nucleoside or internucleoside linkage is modified. As used herein, “unmodified oligonucleotide” means an oligonucleotide that does not comprise any nucleoside modifications or internucleoside modifications.

[0044] As used herein, “pharmaceutically acceptable carrier or diluent” means any substance suitable for use in administering to an animal. Certain such carriers enable pharmaceutical compositions to be formulated as, for example, tablets, pills, dragees, capsules, liquids, gels, syrups, slurries, suspension and lozenges for the oral ingestion by a subject. In certain embodiments, a pharmaceutically acceptable carrier or diluent is sterile water, sterile saline, sterile buffer solution or sterile artificial cerebrospinal fluid.

[0045] As used herein “pharmaceutically acceptable salts” means physiologically and pharmaceutically acceptable salts of compounds. Pharmaceutically acceptable salts retain the desired biological activity of the parent compound and do not impart undesired toxicological effects thereto.

[0046] As used herein “pharmaceutical composition” means a mixture of substances suitable for administering to a subject. For example, a pharmaceutical composition may comprise an oligomeric compound and a sterile aqueous solution. In certain embodiments, a pharmaceutical composition shows activity in free uptake assay in certain cell lines.

[0047] As used herein “prodrug” means a therapeutic agent in a form outside the body that is converted to a different form within an animal or cells thereof. Typically, conversion of a prodrug within the animal is facilitated by the action of an enzymes (e.g., endogenous or viral enzyme) or chemicals present in cells or tissues and/or by physiologic conditions.

[0048] As used herein, “reducing or inhibiting the amount or activity” refers to a reduction or blockade of the transcriptional expression or activity relative to the transcriptional expression or activity in an untreated or control sample and does not necessarily indicate a total elimination of transcriptional expression or activity.

[0049] As used herein, “RNA” means an RNA transcript that encodes a protein and includes pre-mRNA and mature mRNA unless otherwise specified.

[0050] As used herein, “RNAi compound” means an antisense compound that acts, at least in part, through RISC or Ago2 to modulate a target nucleic acid and/or protein encoded by a target nucleic acid. RNAi compounds include, but are not limited to double-stranded siRNA, single-stranded RNA (ssRNA), and microRNA, including microRNA mimics. In certain embodiments, an RNAi compound modulates the amount, activity, and/or splicing of a target nucleic acid. The term RNAi compound excludes antisense compounds that act through RNase H.

[0051] As used herein, “self-complementary” in reference to an oligonucleotide means an oligonucleotide that at least partially hybridizes to itself.

[0052] As used herein, “siRNA” refers to a ribonucleic acid molecule having a duplex structure including two anti-parallel and substantially complementary nucleic acid strands. The two strands forming the duplex structure may be different portions of one larger RNA molecule, or they may be separate RNA molecules. Where the two strands are part of one larger molecule, and therefore are connected by consecutive nucleobases between the 3′-end of one strand and the 5′ end of the respective other strand forming the duplex structure, the connecting RNA chain is referred to as a “hairpin loop”. The RNA strands may have the same or a different number of nucleotides.

[0053] As used herein, “standard cell assay” means the assay described in Example 3 and reasonable variations thereof.

[0054] As used herein, “stereorandom chiral center” in the context of a population of molecules of identical molecular formula means a chiral center having a random stereochemical configuration. For example, in a population of molecules comprising a stereorandom chiral center, the number of molecules having the (S) configuration of the stereorandom chiral center may be but is not necessarily the same as the number of molecules having the (R) configuration of the stereorandom chiral center. The stereochemical configuration of a chiral center is considered random when it is the results of a synthetic method that is not designed to control the stereochemical configuration. In certain embodiments, a stereorandom chiral center is a stereorandom phosphorothioate internucleoside linkage.

[0055] As used herein, “sugar moiety” means an unmodified sugar moiety or a modified sugar moiety. As used herein, “unmodified sugar moiety” means a 2′-OH(H) ribosyl moiety, as found in RNA (an “unmodified RNA sugar moiety”), or a 2′-H(H) deoxyribosyl sugar moiety, as found in DNA (an “unmodified DNA sugar moiety”). Unmodified sugar moieties have one hydrogen at each of the 1′, 3′, and 4′ positions, an oxygen at the 3′ position, and two hydrogens at the 5′ position. As used herein, “modified sugar moiety” or “modified sugar” means a modified furanosyl sugar moiety or a sugar surrogate.

[0056] As used herein, “sugar surrogate” means a modified sugar moiety having other than a furanosyl moiety that can link a nucleobase to another group, such as an internucleoside linkage, conjugate group, or terminal group in an oligonucleotide. Modified nucleosides comprising sugar surrogates can be incorporated into one or more positions within an oligonucleotide and such oligonucleotides are capable of hybridizing to complementary oligomeric compounds or target nucleic acids.

[0057] As used herein, “symptom or hallmark” means any physical feature or test result that indicates the existence or extent of a disease or disorder. In certain embodiments, a symptom is apparent to a subject or to a medical professional examining or testing said subject. In certain embodiments, a hallmark is apparent upon invasive diagnostic testing, including, but not limited to, post-mortem tests.

[0058] As used herein, “target nucleic acid” and “target RNA” mean a nucleic acid that an antisense compound is designed to affect.

[0059] As used herein, “target region” means a portion of a target nucleic acid to which an oligomeric compound is designed to hybridize.

[0060] As used herein, “terminal group” means a chemical group or group of atoms that is covalently linked to a terminus of an oligonucleotide.

[0061] As used herein, “therapeutically effective amount” means an amount of a pharmaceutical agent that provides a therapeutic benefit to an animal. For example, a therapeutically effective amount improves a symptom of a disease.

### CERTAIN EMBODIMENTS

[0062] The present disclosure provides the following non-limiting numbered embodiments:

[0063] Embodiment 1. An oligomeric compound, comprising a modified oligonucleotide consisting of 12 to 50 linked nucleosides wherein the nucleobase sequence of the modified oligonucleotide is at least 90% complementary to an equal length portion of a PMP22 RNA, and wherein the modified oligonucleotide comprises at least one modification selected from a modified sugar, a sugar surrogate, and a modified internucleoside linkage.

[0064] Embodiment 2. An oligomeric compound comprising a modified oligonucleotide consisting of 12 to 50 linked nucleosides and having a nucleobase sequence comprising at least 12, 13, 14, 15, or 16 nucleobases of any of SEQ ID NOS: 37-5373.

[0065] Embodiment 3. An oligomeric compound comprising a modified oligonucleotide consisting of 12 to 50 linked nucleosides and having a nucleobase sequence complementary to at least 8, at least 9, at least 10, at least 11, at least 12, at least 13, at least 14, at least 15, at least 16, at least 17, at least 18, at least 19, or at least 20 contiguous nucleobases of:

[0066] an equal length portion of nucleobases 4,169-4,198 of SEQ ID NO: 2;

[0067] an equal length portion of nucleobases 8,812-8,907 of SEQ ID NO: 2;

[0068] an equal length portion of nucleobases 10,019-10,050 of SEQ ID NO: 2;

[0069] an equal length portion of nucleobases 11,247-11,276 of SEQ ID NO: 2;

[0070] an equal length portion of nucleobases 12,058-12,096 of SEQ ID NO: 2;

[0071] an equal length portion of nucleobases 12,357-13,387 of SEQ ID NO: 2;

[0072] an equal length portion of nucleobases 15,721-15,769 of SEQ ID NO: 2;

[0073] an equal length portion of nucleobases 15,914-15,971 of SEQ ID NO: 2;

[0074] an equal length portion of nucleobases 17,354-17,403 of SEQ ID NO: 2;

[0075] an equal length portion of nucleobases 19,959-19,997 of SEQ ID NO: 2;

[0076] an equal length portion of nucleobases 27,054-27,086 of SEQ ID NO: 2;

[0077] an equal length portion of nucleobases 29,734-29,761 of SEQ ID NO: 2;

[0078] an equal length portion of nucleobases 30,528-30,558 of SEQ ID NO: 2;

[0079] an equal length portion of nucleobases 30,678-30,717 of SEQ ID NO: 2;

[0080] an equal length portion of nucleobases 31,450-31,479 of SEQ ID NO: 2;

[0081] an equal length portion of nucleobases 37,363-37,401 of SEQ ID NO: 2;

[0082] an equal length portion of nucleobases 37,651-37,856 of SEQ ID NO: 2; or an equal length portion of nucleobases 38,107-38,223 of SEQ ID NO: 2.

[0083] Embodiment 4. The oligomeric compound of any of embodiments 1-3, wherein the modified oligonucleotide has a nucleobase sequence that is at least 80%, 85%, 90%, 95%, or 100% complementary to any of the nucleobase sequences of SEQ ID NO: 1-8 when measured across the entire nucleobase sequence of the modified oligonucleotide.

[0084] Embodiment 5. The oligomeric compound of any of embodiments 1-4, wherein the modified oligonucleotide comprises at least one modified nucleoside.

[0085] Embodiment 6. The oligomeric compound of embodiment 5, wherein the modified oligonucleotide comprises at least one modified nucleoside comprising a modified sugar moiety.

[0086] Embodiment 7. The oligomeric compound of embodiment 6, wherein the modified oligonucleotide comprises at least one modified nucleoside comprising a bicyclic sugar moiety.

[0087] Embodiment 8. The oligomeric compound of embodiment 7, wherein the modified oligonucleotide comprises at least one modified nucleoside comprising a bicyclic sugar moiety having a 2′-4′ bridge, wherein the 2′-4′ bridge is selected from —O—CH₂—; and —O—CH(CH₃)—.

[0088] Embodiment 9. The oligomeric compound of any of embodiments 5-8, wherein the modified oligonucleotide comprises at least one modified nucleoside comprising a non-bicyclic modified sugar moiety.

[0089] Embodiment 10. The oligomeric compound of embodiment 9, wherein the modified oligonucleotide comprises at least one modified nucleoside comprising a non-bicyclic modified sugar moiety comprising a 2′-MOE modified sugar or 2′-OMe modified sugar.

[0090] Embodiment 11. The oligomeric compound of any of embodiments 5-10, wherein the modified oligonucleotide comprises at least one modified nucleoside comprising a sugar surrogate.

[0091] Embodiment 12. The oligomeric compound of embodiment 11, wherein the modified oligonucleotide comprises at least one modified nucleoside comprising a sugar surrogate selected from morpholino and PNA.

[0092] Embodiment 13. The oligomeric compound of any of embodiments 1-12, wherein the modified oligonucleotide has a sugar motif comprising:
[0093] a 5′-region consisting of 1-5 linked 5′-region nucleosides;
[0094] a central region consisting of 6-10 linked central region nucleosides; and
[0095] a 3′-region consisting of 1-5 linked 3′-region nucleosides; wherein
[0096] each of the 5′-region nucleosides and each of the 3′-region nucleosides comprises a modified sugar moiety and each of the central region nucleosides comprises a 2′-β-D-deoxyribosyl sugar moiety.

[0097] Embodiment 14. The oligomeric compound of embodiment 13, wherein the modified oligonucleotide has a sugar motif comprising:
[0098] a 5′-region consisting of 3 linked 5′-region nucleosides;
[0099] a central region consisting of 10 linked central region nucleosides; and
[0100] a 3′-region consisting of 3 linked 3′-region nucleosides; wherein
[0101] each of the 5′-region nucleosides and each of the 3′-region nucleosides comprises a cEt modified sugar moiety and each of the central region nucleosides comprises a 2′-β-D-deoxyribosyl sugar moiety.

[0102] Embodiment 15. The oligomeric compound of any of embodiments 1-14, wherein the modified oligonucleotide comprises at least one modified internucleoside linkage.

[0103] Embodiment 16. The oligomeric compound of embodiment 15, wherein each internucleoside linkage of the modified oligonucleotide is a modified internucleoside linkage.

[0104] Embodiment 17. The oligomeric compound of embodiment 15 or 16 wherein at least one internucleoside linkage is a phosphorothioate internucleoside linkage.

[0105] Embodiment 18. The oligomeric compound of embodiment 15 or 17 wherein the modified oligonucleotide comprises at least one phosphodiester internucleoside linkage.

[0106] Embodiment 19. The oligomeric compound of any of embodiments 15, 17, or 18, wherein each internucleoside linkage is independently selected from a phosphodiester internucleoside linkage or a phosphorothioate internucleoside linkage.

[0107] Embodiment 20. The oligomeric compound of any of embodiments 1-19, wherein the modified oligonucleotide comprises a modified nucleobase.

[0108] Embodiment 21. The oligomeric compound of embodiment 20, wherein the modified nucleobase is a 5-methyl cytosine.

[0109] Embodiment 22. The oligomeric compound of any of embodiments 1-21, wherein the modified oligonucleotide consists of 12-30, 12-22, 12-20,14-18, 14-20, 15-17, 15-25, 16-20, 18-22 or 18-20 linked nucleosides.

[0110] Embodiment 23. The oligomeric compound of any of embodiments 1-22, wherein the modified oligonucleotide consists of 16 linked nucleosides.

[0111] Embodiment 24. The oligomeric compound of any of embodiments 1-23, consisting of the modified oligonucleotide.

[0112] Embodiment 25. The oligomeric compound of any of embodiments 1-24, comprising a conjugate group comprising a conjugate moiety and a conjugate linker.

[0113] Embodiment 26. The oligomeric compound of embodiments 25-26, wherein the conjugate linker consists of a single bond.

[0114] Embodiment 27. The oligomeric compound of embodiments 25-26, wherein the conjugate linker is cleavable.

[0115] Embodiment 28. The oligomeric compound of embodiments 25-26, wherein the conjugate linker comprises 1-3 linker-nucleosides.

[0116] Embodiment 29. The oligomeric compound of any of embodiments 25-28, wherein the conjugate group is attached to the modified oligonucleotide at the 5′-end of the modified oligonucleotide.

[0117] Embodiment 30. The oligomeric compound of any of embodiments 25-28, wherein the conjugate group is attached to the modified oligonucleotide at the 3′-end of the modified oligonucleotide.

[0118] Embodiment 31. The oligomeric compound of any of embodiments 1-30, comprising a terminal group.

[0119] Embodiment 32. The oligomeric compound of any of embodiments 1-31 wherein the oligomeric compound is a singled-stranded oligomeric compound.

[0120] Embodiment 33. The oligomeric compound of any of embodiments 1-27 or 29-32, wherein the oligomeric compound does not comprise linker-nucleosides.

[0121] Embodiment 34. An oligomeric duplex comprising an oligomeric compound of any of embodiments 1-23, 25-31, or 33.

[0122] Embodiment 35. An antisense compound comprising or consisting of an oligomeric compound of any of embodiments 1-33 or an oligomeric duplex of embodiment 34.

[0123] Embodiment 36. A pharmaceutical composition comprising an oligomeric compound of any of embodiments 1-34 or an oligomeric duplex of embodiment 35 and a pharmaceutically acceptable carrier or diluent.

[0124] Embodiment 37. The pharmaceutical composition of embodiment 36, wherein the pharmaceutically acceptable diluent is phosphate buffered saline.

[0125] Embodiment 38. The pharmaceutical composition of embodiment 37, wherein the pharmaceutical composition consists essentially of the modified oligonucleotide and phosphate buffered saline.

[0126] Embodiment 39. A method comprising administering to an animal a pharmaceutical composition of any of embodiments 36-38.

[0127] Embodiment 40. A method of treating a disease associated with PMP22 comprising administering to an individual having or at risk for developing a disease associated with PMP22 a therapeutically effective amount of a pharmaceutical composition according to any of embodiments 36-38; and thereby treating the disease associated with PMP22.

[0128] Embodiment 41. The method of embodiment 40, wherein the PMP2-associated disease is Dejerine-Sottas Syndrome.

[0129] Embodiment 42. The method of embodiment 40, wherein the PMP2-associated disease is Charcot-Marie-Tooth disease.

[0130] Embodiment 43. The method of embodiment 42, wherein the Charcot-Marie-Tooth disease is CMT1A.

[0131] Embodiment 44. The method of embodiment 42, wherein the Charcot-Marie-Tooth disease is CMT1E.

[0132] Embodiment 45. The method of any of embodiments 40-44, wherein at least one symptom or hallmark of the PMP22-associated disease is ameliorated.

[0133] Embodiment 46. The method of embodiment 45, wherein the symptom or hallmark is demyelination, progressive axonal damage and/or loss, weakness and wasting of foot and lower leg muscles, foot deformities, and weakness and atrophy in the hands.

### I. Certain Oligonucleotides

[0134] In certain embodiments, provided herein are oligomeric compounds comprising oligonucleotides, which consist of linked nucleosides. Oligonucleotides may be unmodified oligonucleotides (RNA or DNA) or may be modified oligonucleotides. Modified oligonucleotides comprise at least one modification relative to unmodified RNA or DNA. That is, modified oligonucleotides comprise at least one modified nucleoside (comprising a modified sugar moiety and/or a modified nucleobase) and/or at least one modified internucleoside linkage.

[0135] A. Certain Modified Nucleosides

[0136] Modified nucleosides comprise a modified sugar moiety or a modified nucleobase or both a modified sugar moiety and a modified nucleobase.

[0137] 1. Certain Sugar Moieties

[0138] In certain embodiments, modified sugar moieties are non-bicyclic modified sugar moieties. In certain embodiments, modified sugar moieties are bicyclic or tricyclic sugar moieties. In certain embodiments, modified sugar moieties are sugar surrogates. Such sugar surrogates may comprise one or more substitutions corresponding to those of other types of modified sugar moieties.

[0139] In certain embodiments, modified sugar moieties are non-bicyclic modified sugar moieties comprising a furanosyl ring with one or more substituent groups none of which bridges two atoms of the furanosyl ring to form a bicyclic structure. Such non bridging substituents may be at any position of the furanosyl, including but not limited to substituents at the 2′, 4′, and/or 5′ positions. In certain embodiments one or more non-bridging substituent of non-bicyclic modified sugar moieties is branched. Examples of 2′-substituent groups suitable for non-bicyclic modified sugar moieties include but are not limited to: 2′-F, 2′-OCH₃ (“OMe” or “O-methyl”), and 2′-O(CH₂)₂OCH₃ (“MOE”). In certain embodiments, 2′-substituent groups are selected from among: halo, allyl, amino, azido, SH, CN, OCN, CF₃, OCF₃, O—C₁-C₁₀ alkoxy, O—C₁-C₁₀ substituted alkoxy, O—C₁-C₁₀ alkyl, O—C₁-C₁₀ substituted alkyl, S-alkyl, N(Rₘ)-alkyl, O-alkenyl, S-alkenyl, N(Rₘ)-alkenyl, O-alkynyl, S-alkynyl, N(Rₘ)-alkynyl, O-alkylenyl-O-alkyl, alkynyl, alkaryl, aralkyl, O-alkaryl, O-aralkyl, O(CH₂)₂SCH₃, O(CH₂)₂ON(Rₘ)(Rₙ) or OCH₂C(═O)—N(Rₘ)(Rₙ), where each Rₘ and Rₙ is, independently, H, an amino protecting group, or substituted or unsubstituted C₁-C₁₀ alkyl, and the 2′-substituent groups described in Cook et al., U.S. Pat. No. 6,531,584; Cook et al., U.S. Pat. No. 5,859,221; and Cook et al., U.S. Pat. No. 6,005,087. Certain embodiments of these 2′-substituent groups can be further substituted with one or more substituent groups independently selected from among: hydroxyl, amino, alkoxy, carboxy, benzyl, phenyl, nitro (NO₂), thiol, thioalkoxy, thioalkyl, halogen, alkyl, aryl, alkenyl and alkynyl. Examples of 4′-substituent groups suitable for non-bicyclic modified sugar moieties include but are not limited to alkoxy (e.g., methoxy), alkyl, and those described in Manoharan et al., WO 2015/106128. Examples of 5′-substituent groups suitable for non-bicyclic modified sugar moieties include but are not limited to: 5-methyl (R or S), 5′-vinyl, and 5′-methoxy. In certain embodiments, non-bicyclic modified sugar moieties comprise more than one non-bridging sugar substituent, for example, 2′-F-5′-methyl sugar moieties and the modified sugar moieties and modified nucleosides described in Migawa et al., WO 2008/101157 and Rajeev et al., US2013/0203836.).

[0140] In certain embodiments, a 2′-substituted non-bicyclic modified nucleoside comprises a sugar moiety comprising a non-bridging 2′-substituent group selected from: F, NH₂, N₃, OCF₃, OCH₃, O(CH₂)₃NH₂, CH₂CH═CH₂, OCH₂CH═CH₂, OCH₂CH₂OCH₃, O(CH₂)₂SCH₃, O(CH₂)₂ON(Rₘ)(Rₙ), O(CH₂)₂O(CH₂)₂N(CH₃)₂, and N-substituted acetamide (OCH₂C(═O)—N(Rₘ)(Rₙ)), where each Rₘ and Rₙ is, independently, H, an amino protecting group, or substituted or unsubstituted C₁-C₁₀ alkyl.

[0141] In certain embodiments, a 2′-substituted nucleoside non-bicyclic modified nucleoside comprises a sugar moiety comprising a non-bridging 2′-substituent group selected from: F, OCF₃, OCH₃, OCH₂CH₂OCH₃, O(CH₂)₂SCH₃, O(CH₂)₂ON(CH₃)₂, O(CH₂)₂O(CH₂)₂N(CH₃)₂, and OCH₂C(═O)—N(H)CH₃ (“NMA”).

[0142] In certain embodiments, a 2′-substituted non-bicyclic modified nucleoside comprises a sugar moiety comprising a non-bridging 2′-substituent group selected from: F, OCH₃, and OCH₂CH₂OCH₃.

[0143] Certain modified sugar moieties comprise a substituent that bridges two atoms of the furanosyl ring to form a second ring, resulting in a bicyclic sugar moiety. In certain such embodiments, the bicyclic sugar moiety comprises a bridge between the 4′ and the 2′ furanose ring atoms. Examples of such 4′ to 2′ bridging sugar substituents include but are not limited to: 4′-CH₂-2′, 4′-(CH₂)₂-2′, 4′-(CH₂)₃-2′, 4′-CH₂—O-2′ (“LNA”), 4′-CH₂—S-2′, 4′-(CH₂)₂—O-2′ (“ENA”), 4′-CH(CH₃)—O-2′ (referred to as “constrained ethyl” or “cEt”), 4′-CH₂—O—CH₂-2′, 4′-CH₂—N(R)-2′, 4′-CH(CH₂OCH₃)—O-2′ (“constrained MOE” or “cMOE”) and analogs thereof (see, e.g., Seth et al., U.S. Pat. No. 7,399,845, Bhat et al., U.S. Pat. No. 7,569,686, Swayze et al., U.S. Pat. No. 7,741,457, and Swayze et al., U.S. Pat. No. 8,022,193), 4′-C(CH₃)(CH₃)—O-2′ and analogs thereof (see, e.g., Seth et al., U.S. Pat. No. 8,278,283), 4′-CH₂—N(OCH₃)-2′ and analogs thereof (see, e.g., Prakash et al., U.S. Pat. No. 8,278,425), 4′-CH₂—O—N(CH₃)-2′ (see, e.g., Allerson et al., U.S. Pat. No. 7,696,345 and Allerson et al., U.S. Pat. No. 8,124,745), 4′-CH₂—C(H)(CH₃)-2′ (see, e.g., Zhou, et al., J. Org. Chem., 2009, 74, 118-134), 4′-CH₂—C(═CH₂)-2′ and analogs thereof (see e.g., Seth et al., U.S. Pat. No. 8,278,426), 4′-C(RₐR_{b})—N(R)—O-2′, 4′-C(RₐR_{b})—O—N(R)-2′, 4′-CH₂—O—N(R)-2′, and 4′-CH₂—N(R)—O- 2′, wherein each R, Rₐ, and R_{b} is, independently, H, a protecting group, or C₁-C₁₂ alkyl (see, e.g. Imanishi et al., U.S. Pat. No. 7,427,672).

[0144] In certain embodiments, such 4′ to 2′ bridges independently comprise from 1 to 4 linked groups independently selected from: —[C(Rₐ)(R_{b})]ₙ—, —[C(Rₐ)(R_{b})]ₙ—O—, —C(Rₐ)═C(R_{b})—, —C(R_{L})═N—, —C(═NRₐ)—, —C(═O)—, —C(═S)—, —O—, —Si(Rₐ)₂—, —S(═O)ₓ—, and —N(Rₐ)—;

[0145] wherein:

[0146] x is 0, 1, or 2;

[0147] n is 1, 2, 3, or 4;

[0148] each Rₐ and R_{b} is, independently, H, a protecting group, hydroxyl, C₁-C₁₂ alkyl, substituted C₁-C₁₂ alkyl, C₂-C₁₂ alkenyl, substituted C₂-C₁₂ alkenyl, C₂-C₁₂ alkynyl, substituted C₂-C₁₂ alkynyl, C₅-C₂₀ aryl, substituted C₅-C₂₀ aryl, heterocycle radical, substituted heterocycle radical, heteroaryl, substituted heteroaryl, C₅-C₇ alicyclic radical, substituted C₅-C₇ alicyclic radical, halogen, OJ₁, NJ₁J₂, SJ₁, N₃, COOJ₁, acyl (C(═O)—H), substituted acyl, CN, sulfonyl (S(═O)₂-J₁), or sulfoxyl (S(═O)-J₁); and

[0149] each J₁ and J₂ is, independently, H, C₁-C₁₂ alkyl, substituted C₁-C₁₂ alkyl, C₂-C₁₂ alkenyl, substituted C₂-C₁₂ alkenyl, C₂-C₁₂ alkynyl, substituted C₂-C₁₂ alkynyl, C₅-C₂₀ aryl, substituted C₅-C₂₀ aryl, acyl (C(═O)—H), substituted acyl, a heterocycle radical, a substituted heterocycle radical, C₁-C₁₂ aminoalkyl, substituted C₁-C₁₂ aminoalkyl, or a protecting group.

[0150] Additional bicyclic sugar moieties are known in the art, see, for example: Freier et al., Nucleic Acids Research, 1997, 25(22), 4429-4443, Albaek et al., J. Org. Chem., 2006, 71, 7731-7740, Singh et al., Chem. Commun., 1998, 4, 455-456; Koshkin et al., Tetrahedron, 1998, 54, 3607-3630; Kumar et al., Bioorg. Med. Chem. Lett., 1998, 8, 2219-2222; Singh et al., J. Org. Chem., 1998, 63, 10035-10039; Srivastava et al., J. Am. Chem. Soc., 20017, 129, 8362-8379; Wengel et a., U.S. Pat. No. 7,053,207; Imanishi et al., U.S. Pat. No. 6,268,490; Imanishi et al. U.S. Pat. No. 6,770,748; Imanishi et al., U.S. RE44,779; Wengel et al., U.S. Pat. No. 6,794,499; Wengel et al., U.S. 6,670,461; Wengel et al., U.S. Pat. No. 7,034,133; Wengel et al., U.S. Pat. No. 8,080,644; Wengel et al., U.S. Pat. No. 8,034,909; Wengel et al., U.S. Pat. No. 8,153,365; Wengel et al., U.S. Pat. No. 7,572,582; and Ramasamy et al., U.S. Pat. No. 6,525,191; Torsten et al., WO 2004/106356; Wengel et al., WO 1999/014226; Seth et al., WO 2007/134181; Seth et al., U.S. Pat. No. 7,547,684; Seth et al., U.S. Pat. No. 7,666,854; Seth et al., U.S. Pat. No. 8,088,746; Seth et al., U.S. Pat. No. 7,750,131; Seth et al., U.S. Pat. No. 8,030,467; Seth et al., U.S. Pat. No. 8,268,980; Seth et al., U.S. Pat. No. 8,546,556; Seth et al., U.S. Pat. No. 8,530,640; Migawa et al., U.S. Pat. No. 9,012,421; Seth et al., U.S. Pat. No. 8,501,805; and U.S. Patent Publication Nos. Allerson et al., US2008/0039618 and Migawa et al., US2015/0191727.

[0151] In certain embodiments, bicyclic sugar moieties and nucleosides incorporating such bicyclic sugar moieties are further defined by isomeric configuration. For example, an LNA nucleoside (described herein) may be in the α-L configuration or in the β-D configuration.

[chemical structure]

α-L-methyleneoxy (4′-CH₂—O-2′) or α-L-LNA bicyclic nucleosides have been incorporated into oligonucleotides that showed antisense activity (Frieden et al., Nucleic Acids Research, 2003, 21, 6365-6372). Herein, general descriptions of bicyclic nucleosides include both isomeric configurations. When the positions of specific bicyclic nucleosides (e.g., LNA or cEt) are identified in exemplified embodiments herein, they are in the β-D configuration, unless otherwise specified.

[0152] In certain embodiments, modified sugar moieties comprise one or more non-bridging sugar substituent and one or more bridging sugar substituent (e.g., 5′-substituted and 4′-2′ bridged sugars).

[0153] In certain embodiments, modified sugar moieties are sugar surrogates. In certain such embodiments, the oxygen atom of the sugar moiety is replaced, e.g., with a sulfur, carbon or nitrogen atom. In certain such embodiments, such modified sugar moieties also comprise bridging and/or non-bridging substituents as described herein. For example, certain sugar surrogates comprise a 4′-sulfur atom and a substitution at the 2′-position (see, e.g., Bhat et al., U.S. Pat. No. 7,875,733 and Bhat et al., U.S. Pat. No. 7,939,677) and/or the 5′ position.

[0154] In certain embodiments, sugar surrogates comprise rings having other than 5 atoms. For example, in certain embodiments, a sugar surrogate comprises a six-membered tetrahydropyran (“THP”). Such tetrahydropyrans may be further modified or substituted. Nucleosides comprising such modified tetrahydropyrans include but are not limited to hexitol nucleic acid (“HNA”), anitol nucleic acid (“ANA”), manitol nucleic acid (“MNA”) (see, e.g., Leumann, C J. Bioorg. & Med. Chem. 2002, 10, 841-854), fluoro HNA:

[chemical structure]

(“F-HNA”, see e.g. Swayze et al., U.S. Pat. No. 8,088,904; Swayze et al., U.S. Pat. No. 8,440,803; Swayze et al., U.S. 8,796,437; and Swayze et al., U.S. Pat. No. 9,005,906; F-HNA can also be referred to as a F-THP or 3′-fluoro tetrahydropyran), and nucleosides comprising additional modified THP compounds having the formula:

[chemical structure]

wherein, independently, for each of said modified THP nucleoside:

[0155] Bx is a nucleobase moiety;

[0156] T₃ and T₄ are each, independently, an internucleoside linking group linking the modified THP nucleoside to the remainder of an oligonucleotide or one of T₃ and T₄ is an internucleoside linking group linking the modified THP nucleoside to the remainder of an oligonucleotide and the other of T₃ and T₄ is H, a hydroxyl protecting group, a linked conjugate group, or a 5′ or 3′-terminal group; q₁, q₂, q₃, q₄, q₅, q₆ and q₇ are each, independently, H, C₁-C₆ alkyl, substituted C₁-C₆ alkyl, C₂-C₆ alkenyl, substituted C₂-C₆ alkenyl, C₂-C₆ alkynyl, or substituted C₂-C₆ alkynyl; and

[0157] each of R₁ and R₂ is independently selected from among: hydrogen, halogen, substituted or unsubstituted alkoxy, NJ₁J₂, SJ₁, N₃, OC(═X)J₁, OC(═X)NJ₁J₂, NJ₃C(═X)NJ₁J₂, and CN, wherein X is O, S or NJ₁, and each J₁, J₂, and J₃ is, independently, H or C₁-C₆ alkyl.

[0158] In certain embodiments, modified THP nucleosides are provided wherein q₁, q₂, q₃, q₄, q₅, q₆ and are each H. In certain embodiments, at least one of q₁, q₂, q₃, q₄, q₅, q₆ and q₇ is other than H. In certain embodiments, at least one of q₁, q₂, q₃, q₄, q₅, q₆ and q₇ is methyl. In certain embodiments, modified THP nucleosides are provided wherein one of R₁ and R₂ is F. In certain embodiments, R₁ is F and R₂ is H, in certain embodiments, R₁ is methoxy and R₂ is H, and in certain embodiments, R₁ is methoxyethoxy and R₂ is H.

[0159] In certain embodiments, sugar surrogates comprise rings having more than 5 atoms and more than one heteroatom. For example, nucleosides comprising morpholino sugar moieties and their use in oligonucleotides have been reported (see, e.g., Braasch et al., Biochemistry, 2002, 41, 4503-4510 and Summerton et al., U.S. Pat. No. 5,698,685; Summerton et al., U.S. Pat. No. 5,166,315; Summerton et al., U.S. Pat. No. 5,185,444; and Summerton et al., U.S. Pat. No. 5,034,506). As used here, the term “morpholino” means a sugar surrogate having the following structure:

[chemical structure]

In certain embodiments, morpholinos may be modified, for example by adding or altering various substituent groups from the above morpholino structure. Such sugar surrogates are referred to herein as “modified morpholinos.”

[0160] In certain embodiments, sugar surrogates comprise acyclic moieites. Examples of nucleosides and oligonucleotides comprising such acyclic sugar surrogates include but are not limited to: peptide nucleic acid (“PNA”), acyclic butyl nucleic acid (see, e.g., Kumar et al., Org. Biomol. Chem., 2013, 11, 5853-5865), and nucleosides and oligonucleotides described in Manoharan et al., WO2011/133876.

[0161] Many other bicyclic and tricyclic sugar and sugar surrogate ring systems are known in the art that can be used in modified nucleosides.

[0162] 2. Certain Modified Nucleobases

[0163] In certain embodiments, modified oligonucleotides comprise one or more nucleoside comprising an unmodified nucleobase. In certain embodiments, modified oligonucleotides comprise one or more nucleoside comprising a modified nucleobase. In certain embodiments, modified oligonucleotides comprise one or more nucleoside that does not comprise a nucleobase, referred to as an abasic nucleoside.

[0164] In certain embodiments, modified nucleobases are selected from: 5-substituted pyrimidines, 6-azapyrimidines, alkyl or alkynyl substituted pyrimidines, alkyl substituted purines, and N-2, N-6 and 0-6 substituted purines. In certain embodiments, modified nucleobases are selected from: 2-aminopropyladenine, 5-hydroxymethyl cytosine, xanthine, hypoxanthine, 2-aminoadenine, 6-N-methylguanine, 6-N-methyladenine, 2-propyladenine, 2-thiouracil, 2-thiothymine and 2-thiocytosine, 5-propynyl (—C≡C—CH₃) uracil, 5-propynylcytosine, 6-azouracil, 6-azocytosine, 6-azothymine, 5-ribosyluracil (pseudouracil), 4-thiouracil, 8-halo, 8-amino, 8-thiol, 8-thioalkyl, 8-hydroxyl, 8-aza and other 8-substituted purines, 5-halo, particularly 5-bromo, 5-trifluoromethyl, 5-halouracil, and 5-halocytosine, 7-methylguanine, 7-methyladenine, 2-F-adenine, 2-aminoadenine, 7-deazaguanine, 7-deazaadenine, 3-deazaguanine, 3-deazaadenine, 6-N-benzoyladenine, 2-N-isobutyrylguanine, 4-N-benzoylcytosine, 4-N-benzoyluracil, 5-methyl 4-N-benzoylcytosine, 5-methyl 4-N-benzoyluracil, universal bases, hydrophobic bases, promiscuous bases, size-expanded bases, and fluorinated bases. Further modified nucleobases include tricyclic pyrimidines, such as 1,3-diazaphenoxazine-2-one, 1,3-diazaphenothiazine-2-one and 9-(2-aminoethoxy)-1,3-diazaphenoxazine-2-one (G-clamp). Modified nucleobases may also include those in which the purine or pyrimidine base is replaced with other heterocycles, for example 7-deaza-adenine, 7-deazaguanosine, 2-aminopyridine and 2-pyridone. Further nucleobases include those disclosed in Merigan et al., U.S. Pat. No. 3,687,808, those disclosed in The Concise Encyclopedia Of Polymer Science And Engineering, Kroschwitz, J. I., Ed., John Wiley & Sons, 1990, 858-859; Englisch et al., Angewandte Chemie, International Edition, 1991, 30, 613; Sanghvi, Y. S., Chapter 15, Antisense Research and Applications, Crooke, S. T. and Lebleu, B., Eds., CRC Press, 1993, 273-288; and those disclosed in Chapters 6 and 15, Antisense Drug Technology, Crooke S. T., Ed., CRC Press, 2008, 163-166 and 442-443.

[0165] Publications that teach the preparation of certain of the above noted modified nucleobases as well as other modified nucleobases include without limitation, Manoharan et al., US2003/0158403; Manoharan et al., US2003/0175906; Dinh et al., U.S. Pat. No. 4,845,205; Spielvogel et al., U.S. Pat. No. 5,130,302; Rogers et al., U.S. Pat. No. 5,134,066; Bischofberger et al., U.S. Pat. No. 5,175,273; Urdea et al., U.S. Pat. No. 5,367,066; Benner et al., U.S. Pat. No. 5,432,272; Matteucci et al., U.S. Pat. No. 5,434,257; Gmeiner et al., U.S. Pat. No. 5,457,187; Cook et al., U.S. Pat. No. 5,459,255; Froehler et al., U.S. Pat. No. 5,484,908; Matteucci et al., U.S. Pat. No. 5,502,177; Hawkins et al., U.S. Pat. No. 5,525,711; Haralambidis et al., U.S. Pat. No. 5,552,540; Cook et al., U.S. Pat. No. 5,587,469; Froehler et al., U.S. Pat. No. 5,594,121; Switzer et al., U.S. Pat. No. 5,596,091; Cook et al., U.S. Pat. No. 5,614,617; Froehler et al., U.S. Pat. No. 5,645,985; Cook et al., U.S. Pat. No. 5,681,941; Cook et al., U.S. Pat. No. 5,811,534; Cook et al., U.S. Pat. No. 5,750,692; Cook et al., U.S. Pat. No. 5,948,903; Cook et al., U.S. Pat. No. 5,587,470; Cook et al., U.S. Pat. No. 5,457,191; Matteucci et al., U.S. Pat. No. 5,763,588; Froehler et al., U.S. Pat. No. 5,830,653; Cook et al., U.S. Pat. No. 5,808,027; Cook et al., 6,166,199; and Matteucci et al., U.S. Pat. No. 6,005,096.

[0166] 3. Certain Modified Internucleoside Linkages

[0167] In certain embodiments, nucleosides of modified oligonucleotides may be linked together using any internucleoside linkage. The two main classes of internucleoside linking groups are defined by the presence or absence of a phosphorus atom. Representative phosphorus-containing internucleoside linkages include but are not limited to phosphates, which contain a phosphodiester bond (“P═O”) (also referred to as unmodified or naturally occurring linkages), phosphotriesters, methylphosphonates, phosphoramidates, and phosphorothioates (“P═S”), and phosphorodithioates (“HS—P═S”). Representative non-phosphorus containing internucleoside linking groups include but are not limited to methylenemethylimino (—CH₂—N(CH₃)—O—CH₂—), thiodiester, thionocarbamate (—O—C(═O)(NH)—S—); siloxane (—O—SiH₂—O—); and N,N′-dimethylhydrazine (—CH₂—N(CH₃)—N(CH₃)—). Modified internucleoside linkages, compared to naturally occurring phosphate linkages, can be used to alter, typically increase, nuclease resistance of the oligonucleotide. In certain embodiments, internucleoside linkages having a chiral atom can be prepared as a racemic mixture, or as separate enantiomers. Methods of preparation of phosphorous-containing and non-phosphorous-containing internucleoside linkages are well known to those skilled in the art.

[0168] Representative internucleoside linkages having a chiral center include but are not limited to alkylphosphonates and phosphorothioates. Modified oligonucleotides comprising internucleoside linkages having a chiral center can be prepared as populations of modified oligonucleotides comprising stereorandom internucleoside linkages, or as populations of modified oligonucleotides comprising phosphorothioate linkages in particular stereochemical configurations. In certain embodiments, populations of modified oligonucleotides comprise phosphorothioate internucleoside linkages wherein all of the phosphorothioate internucleoside linkages are stereorandom. Such modified oligonucleotides can be generated using synthetic methods that result in random selection of the stereochemical configuration of each phosphorothioate linkage. Nonetheless, as is well understood by those of skill in the art, each individual phosphorothioate of each individual oligonucleotide molecule has a defined stereoconfiguration. In certain embodiments, populations of modified oligonucleotides are enriched for modified oligonucleotides comprising one or more particular phosphorothioate internucleoside linkages in a particular, independently selected stereochemical configuration. In certain embodiments, the particular configuration of the particular phosphorothioate linkage is present in at least 65% of the molecules in the population. In certain embodiments, the particular configuration of the particular phosphorothioate linkage is present in at least 70% of the molecules in the population. In certain embodiments, the particular configuration of the particular phosphorothioate linkage is present in at least 80% of the molecules in the population. In certain embodiments, the particular configuration of the particular phosphorothioate linkage is present in at least 90% of the molecules in the population. In certain embodiments, the particular configuration of the particular phosphorothioate linkage is present in at least 99% of the molecules in the population. Such chirally enriched populations of modified oligonucleotides can be generated using synthetic methods known in the art, e.g., methods described in Oka et al., JACS 125, 8307 (2003), Wan et al. Nuc. Acid. Res. 42, 13456 (2014), and WO 2017/015555. In certain embodiments, a population of modified oligonucleotides is enriched for modified oligonucleotides having at least one indicated phosphorothioate in the (Sp) configuration. In certain embodiments, a population of modified oligonucleotides is enriched for modified oligonucleotides having at least one phosphorothioate in the (Rp) configuration. In certain embodiments, modified oligonucleotides comprising (Rp) and/or (Sp) phosphorothioates comprise one or more of the following formulas, respectively, wherein “B” indicates a nucleobase:

[chemical structure]

Unless otherwise indicated, chiral internucleoside linkages of modified oligonucleotides described herein can be stereorandom or in a particular stereochemical configuration.

[0169] Neutral internucleoside linkages include, without limitation, phosphotriesters, methylphosphonates, MMI (3′-CH₂—N(CH₃)—O-5′), amide-3 (3′-CH₂—C(═O)—N(H)-5′), amide-4 (3′-CH₂—N(H)-C(═O)-5′), formacetal (3′-O—CH₂—O-5′), me thoxypropyl (MOP), and thioformacetal (3′-S—CH₂—O-5′). Further neutral internucleoside linkages include nonionic linkages comprising siloxane (dialkylsiloxane), carboxylate ester, carboxamide, sulfide, sulfonate ester and amides (See for example: Carbohydrate Modifications in Antisense Research; Y. S. Sanghvi and P. D. Cook, Eds., ACS Symposium Series 580; Chapters 3 and 4, 40-65). Further neutral internucleoside linkages include nonionic linkages comprising mixed N, O, S and CH₂ component parts.

[0170] B. Certain Motifs

[0171] In certain embodiments, modified oligonucleotides comprise one or more modified nucleosides comprising a modified sugar moiety. In certain embodiments, modified oligonucleotides comprise one or more modified nucleosides comprising a modified nucleobase. In certain embodiments, modified oligonucleotides comprise one or more modified internucleoside linkage. In such embodiments, the modified, unmodified, and differently modified sugar moieties, nucleobases, and/or internucleoside linkages of a modified oligonucleotide define a pattern or motif. In certain embodiments, the patterns of sugar moieties, nucleobases, and internucleoside linkages are each independent of one another. Thus, a modified oligonucleotide may be described by its sugar motif, nucleobase motif and/or internucleoside linkage motif (as used herein, nucleobase motif describes the modifications to the nucleobases independent of the sequence of nucleobases).

[0172] 1. Certain Sugar Motifs

[0173] In certain embodiments, oligonucleotides comprise one or more type of modified sugar and/or unmodified sugar moiety arranged along the oligonucleotide or region thereof in a defined pattern or sugar motif. In certain instances, such sugar motifs include but are not limited to any of the sugar modifications discussed herein.

[0174] In certain embodiments, modified oligonucleotides comprise or consist of a region having a gapmer motif, which is defined by two external regions or “wings” and a central or internal region or “gap.” The three regions of a gapmer motif (the 5′-wing, the gap, and the 3′-wing) form a contiguous sequence of nucleosides wherein at least some of the sugar moieties of the nucleosides of each of the wings differ from at least some of the sugar moieties of the nucleosides of the gap. Specifically, at least the sugar moieties of the nucleosides of each wing that are closest to the gap (the 3′-most nucleoside of the 5′-wing and the 5′-most nucleoside of the 3′-wing) differ from the sugar moiety of the neighboring gap nucleosides, thus defining the boundary between the wings and the gap (i.e., the wing/gap junction). In certain embodiments, the sugar moieties within the gap are the same as one another. In certain embodiments, the gap includes one or more nucleoside having a sugar moiety that differs from the sugar moiety of one or more other nucleosides of the gap. In certain embodiments, the sugar motifs of the two wings are the same as one another (symmetric gapmer). In certain embodiments, the sugar motif of the 5′-wing differs from the sugar motif of the 3′-wing (asymmetric gapmer).

[0175] In certain embodiments, the wings of a gapmer comprise 1-5 nucleosides. In certain embodiments, each nucleoside of each wing of a gapmer comprises a modified sugar moiety. In certain embodiments, at least one nucleoside of each wing of a gapmer comprises a modified sugar moiety. In certain embodiments, at least two nucleosides of each wing of a gapmer comprises a modified sugar moiety. In certain embodiments, at least three nucleosides of each wing of a gapmer comprises a modified sugar moiety. In certain embodiments, at least four nucleosides of each wing of a gapmer comprises a modified sugar moiety.

[0176] In certain embodiments, the gap of a gapmer comprises 7-12 nucleosides. In certain embodiments, each nucleoside of the gap of a gapmer comprises a 2′-β-D-deoxyribosyl sugar moiety. In certain embodiments, at least one nucleoside of the gap of a gapmer comprises a modified sugar moiety.

[0177] In certain embodiments, the gapmer is a deoxy gapmer. In certain embodiments, the nucleosides on the gap side of each wing/gap junction comprise 2′-deoxyribosyl sugar moieties and the nucleosides on the wing sides of each wing/gap junction comprise modified sugar moieties. In certain embodiments, each nucleoside of the gap comprises a 2′-β-D-deoxyribosyl sugar moiety. In certain embodiments, each nucleoside of each wing of a gapmer comprises a modified sugar moiety.

[0178] In certain embodiments, modified oligonucleotides comprise or consist of a region having a fully modified sugar motif. In such embodiments, each nucleoside of the fully modified region of the modified oligonucleotide comprises a modified sugar moiety. In certain embodiments, each nucleoside of the entire modified oligonucleotide comprises a modified sugar moiety. In certain embodiments, modified oligonucleotides comprise or consist of a region having a fully modified sugar motif, wherein each nucleoside within the fully modified region comprises the same modified sugar moiety, referred to herein as a uniformly modified sugar motif. In certain embodiments, a fully modified oligonucleotide is a uniformly modified oligonucleotide. In certain embodiments, each nucleoside of a uniformly modified comprises the same 2′-modification.

[0179] Herein, the lengths (number of nucleosides) of the three regions of a gapmer may be provided using the notation [# of nucleosides in the 5′-wing]—[# of nucleosides in the gap]—[# of nucleosides in the 3′-wing]. Thus, a 3-10-3 gapmer consists of 3 linked nucleosides in each wing and 10 linked nucleosides in the gap. Where such nomenclature is followed by a specific modification, that modification is the modification in each sugar moiety of each wing and the gap nucleosides comprise 2′-β-D-deoxyribosyl sugar moieties. Thus, a 5-10-5 MOE gapmer consists of 5 linked 2′-MOE nucleosides in the 5′-wing, 10 linked 2′-β-D-deoxynucleosides in the gap, and 5 linked 2′-MOE nucleosides in the 3′-wing. A 3-10-3 cEt gapmer consists of 3 linked cEt nucleosides in the 5′-wing, 10 linked 2′-β-D-deoxynucleosides in the gap, and 3 linked cEt nucleosides in the 3′-wing.

[0180] In certain embodiments, modified oligonucleotides are 5-10-5 MOE gapmers. In certain embodiments, modified oligonucleotides are 3-10-3 BNA gapmers. In certain embodiments, modified oligonucleotides are 3-10-3 cEt gapmers. In certain embodiments, modified oligonucleotides are 3-10-3 LNA gapmers.

[0181] 2. Certain Nucleobase Motifs

[0182] In certain embodiments, oligonucleotides comprise modified and/or unmodified nucleobases arranged along the oligonucleotide or region thereof in a defined pattern or motif. In certain embodiments, each nucleobase is modified. In certain embodiments, none of the nucleobases are modified. In certain embodiments, each purine or each pyrimidine is modified. In certain embodiments, each adenine is modified. In certain embodiments, each guanine is modified. In certain embodiments, each thymine is modified. In certain embodiments, each uracil is modified. In certain embodiments, each cytosine is modified. In certain embodiments, some or all of the cytosine nucleobases in a modified oligonucleotide are 5-methyl cytosines. In certain embodiments, all of the cytosine nucleobases are 5-methyl cytosines and all of the other nucleobases of the modified oligonucleotide are unmodified nucleobases.

[0183] In certain embodiments, modified oligonucleotides comprise a block of modified nucleobases. In certain such embodiments, the block is at the 3′-end of the oligonucleotide. In certain embodiments the block is within 3 nucleosides of the 3′-end of the oligonucleotide. In certain embodiments, the block is at the 5′-end of the oligonucleotide. In certain embodiments the block is within 3 nucleosides of the 5′-end of the oligonucleotide.

[0184] In certain embodiments, oligonucleotides having a gapmer motif comprise a nucleoside comprising a modified nucleobase. In certain such embodiments, one nucleoside comprising a modified nucleobase is in the central gap of an oligonucleotide having a gapmer motif. In certain such embodiments, the sugar moiety of said nucleoside is a 2′-deoxyribosyl sugar moiety. In certain embodiments, the modified nucleobase is selected from: a 2-thiopyrimidine and a 5-propynepyrimidine.

[0185] 3. Certain Internucleoside Linkage Motifs

[0186] In certain embodiments, oligonucleotides comprise modified and/or unmodified internucleoside linkages arranged along the oligonucleotide or region thereof in a defined pattern or motif. In certain embodiments, each internucleoside linking group is a phosphodiester internucleoside linkage (P═O). In certain embodiments, each internucleoside linking group of a modified oligonucleotide is a phosphorothioate internucleoside linkage (P═S). In certain embodiments, each internucleoside linkage of a modified oligonucleotide is independently selected from a phosphorothioate internucleoside linkage and phosphodiester internucleoside linkage. In certain embodiments, each phosphorothioate internucleoside linkage is independently selected from a stereorandom phosphorothioate a (Sp) phosphorothioate, and a (Rp) phosphorothioate. In certain embodiments, the sugar motif of a modified oligonucleotide is a gapmer and the internucleoside linkages within the gap are all modified. In certain such embodiments, some or all of the internucleoside linkages in the wings are unmodified phosphodiester internucleoside linkages. In certain embodiments, the terminal internucleoside linkages are modified. In certain embodiments, the sugar motif of a modified oligonucleotide is a gapmer, and the internucleoside linkage motif comprises at least one phosphodiester internucleoside linkage in at least one wing, wherein the at least one phosphodiester linkage is not a terminal internucleoside linkage, and the remaining internucleoside linkages are phosphorothioate internucleoside linkages. In certain such embodiments, all of the phosphorothioate linkages are stereorandom. In certain embodiments, all of the phosphorothioate linkages in the wings are (Sp) phosphorothioates, and the gap comprises at least one Sp, Sp, Rp motif. In certain embodiments, populations of modified oligonucleotides are enriched for modified oligonucleotides comprising such internucleoside linkage motifs.

[0187] C. Certain Lengths

[0188] It is possible to increase or decrease the length of an oligonucleotide without eliminating activity. For example, in Woolf et al. (Proc. Natl. Acad. Sci. USA 89:7305-7309, 1992), a series of oligonucleotides 13-25 nucleobases in length were tested for their ability to induce cleavage of a target RNA in an oocyte injection model. Oligonucleotides 25 nucleobases in length with 8 or 11 mismatch bases near the ends of the oligonucleotides were able to direct specific cleavage of the target RNA, albeit to a lesser extent than the oligonucleotides that contained no mismatches. Similarly, target specific cleavage was achieved using 13 nucleobase oligonucleotides, including those with 1 or 3 mismatches.

[0189] In certain embodiments, oligonucleotides (including modified oligonucleotides) can have any of a variety of ranges of lengths. In certain embodiments, oligonucleotides consist of X to Y linked nucleosides, where X represents the fewest number of nucleosides in the range and Y represents the largest number nucleosides in the range. In certain such embodiments, X and Y are each independently selected from 8, 9, 10, 11, 12, 13, 14, 15, 16, 17, 18, 19, 20, 21, 22, 23, 24, 25, 26, 27, 28, 29, 30, 31, 32, 33, 34, 35, 36, 37, 38, 39, 40, 41, 42, 43, 44, 45, 46, 47, 48, 49, and 50; provided that X<Y. For example, in certain embodiments, oligonucleotides consist of 12 to 13, 12 to 14, 12 to 15, 12 to 16, 12 to 17, 12 to 18, 12 to 19, 12 to 20, 12 to 21, 12 to 22, 12 to 23, 12 to 24, 12 to 25, 12 to 26, 12 to 27, 12 to 28, 12 to 29, 12 to 30, 13 to 14, 13 to 15, 13 to 16, 13 to 17, 13 to 18, 13 to 19, 13 to 20, 13 to 21, 13 to 22, 13 to 23, 13 to 24, 13 to 25, 13 to 26, 13 to 27, 13 to 28, 13 to 29, 13 to 30, 14 to 15, 14 to 16, 14 to 17, 14 to 18, 14 to 19, 14 to 20, 14 to 21, 14 to 22, 14 to 23, 14 to 24, 14 to 25, 14 to 26, 14 to 27, 14 to 28, 14 to 29, 14 to 30, 15 to 16, 15 to 17, 15 to 18, 15 to 19, 15 to 20, 15 to 21, 15 to 22, 15 to 23, 15 to 24, 15 to 25, 15 to 26, 15 to 27, 15 to 28, 15 to 29, 15 to 30, 16 to 17, 16 to 18, 16 to 19, 16 to 20, 16 to 21, 16 to 22, 16 to 23, 16 to 24, 16 to 25, 16 to 26, 16 to 27, 16 to 28, 16 to 29, 16 to 30, 17 to 18, 17 to 19, 17 to 20, 17 to 21, 17 to 22, 17 to 23, 17 to 24, 17 to 25, 17 to 26, 17 to 27, 17 to 28, 17 to 29, 17 to 30, 18 to 19, 18 to 20, 18 to 21, 18 to 22, 18 to 23, 18 to 24, 18 to 25, 18 to 26, 18 to 27, 18 to 28, 18 to 29, 18 to 30, 19 to 20, 19 to 21, 19 to 22, 19 to 23, 19 to 24, 19 to 25, 19 to 26, 19 to 29, 19 to 28, 19 to 29, 19 to 30, 20 to 21, 20 to 22, 20 to 23, 20 to 24, 20 to 25, 20 to 26, 20 to 27, 20 to 28, 20 to 29, 20 to 30, 21 to 22, 21 to 23, 21 to 24, 21 to 25, 21 to 26, 21 to 27, 21 to 28, 21 to 29, 21 to 30, 22 to 23, 22 to 24, 22 to 25, 22 to 26, 22 to 27, 22 to 28, 22 to 29, 22 to 30, 23 to 24, 23 to 25, 23 to 26, 23 to 27, 23 to 28, 23 to 29, 23 to 30, 24 to 25, 24 to 26, 24 to 27, 24 to 28, 24 to 29, 24 to 30, 25 to 26, 25 to 27, 25 to 28, 25 to 29, 25 to 30, 26 to 27, 26 to 28, 26 to 29, 26 to 30, 27 to 28, 27 to 29, 27 to 30, 28 to 29, 28 to 30, or 29 to 30 linked nucleosides.

[0190] D. Certain Modified Oligonucleotides

[0191] In certain embodiments, the above modifications (sugar, nucleobase, internucleoside linkage) are incorporated into a modified oligonucleotide. In certain embodiments, modified oligonucleotides are characterized by their modification motifs and overall lengths. In certain embodiments, such parameters are each independent of one another. Thus, unless otherwise indicated, each internucleoside linkage of an oligonucleotide having a gapmer sugar motif may be modified or unmodified and may or may not follow the gapmer modification pattern of the sugar modifications. For example, the internucleoside linkages within the wing regions of a sugar gapmer may be the same or different from one another and may be the same or different from the internucleoside linkages of the gap region of the sugar motif. Likewise, such sugar gapmer oligonucleotides may comprise one or more modified nucleobase independent of the gapmer pattern of the sugar modifications. Unless otherwise indicated, all modifications are independent of nucleobase sequence.

[0192] E. Certain Populations of Modified Oligonucleotides

[0193] Populations of modified oligonucleotides in which all of the modified oligonucleotides of the population have the same molecular formula can be stereorandom populations or chirally enriched populations. All of the chiral centers of all of the modified oligonucleotides are stereorandom in a stereorandom population. In a chirally enriched population, at least one particular chiral center is not stereorandom in the modified oligonucleotides of the population. In certain embodiments, the modified oligonucleotides of a chirally enriched population are enriched for β-D ribosyl sugar moieties, and all of the phosphorothioate internucleoside linkages are stereorandom. In certain embodiments, the modified oligonucleotides of a chirally enriched population are enriched for both β-D ribosyl sugar moieties and at least one, particular phosphorothioate internucleoside linkage in a particular stereochemical configuration.

[0194] F. Nucleobase Sequence

[0195] In certain embodiments, oligonucleotides (unmodified or modified oligonucleotides) are further described by their nucleobase sequence. In certain embodiments oligonucleotides have a nucleobase sequence that is complementary to a second oligonucleotide or an identified reference nucleic acid, such as a target nucleic acid. In certain such embodiments, a region of an oligonucleotide has a nucleobase sequence that is complementary to a second oligonucleotide or an identified reference nucleic acid, such as a target nucleic acid. In certain embodiments, the nucleobase sequence of a region or entire length of an oligonucleotide is at least 50%, at least 60%, at least 70%, at least 80%, at least 85%, at least 90%, at least 95%, or 100% complementary to the second oligonucleotide or nucleic acid, such as a target nucleic acid.

### II. Certain Oligomeric Compounds

[0196] In certain embodiments, provided herein are oligomeric compounds, which consist of an oligonucleotide (modified or unmodified) and optionally one or more conjugate groups and/or terminal groups. Conjugate groups consist of one or more conjugate moiety and a conjugate linker which links the conjugate moiety to the oligonucleotide. Conjugate groups may be attached to either or both ends of an oligonucleotide and/or at any internal position. In certain embodiments, conjugate groups are attached to the 2′-position of a nucleoside of a modified oligonucleotide. In certain embodiments, conjugate groups that are attached to either or both ends of an oligonucleotide are terminal groups. In certain such embodiments, conjugate groups or terminal groups are attached at the 3′ and/or 5′-end of oligonucleotides. In certain such embodiments, conjugate groups (or terminal groups) are attached at the 3′-end of oligonucleotides. In certain embodiments, conjugate groups are attached near the 3′-end of oligonucleotides. In certain embodiments, conjugate groups (or terminal groups) are attached at the 5′-end of oligonucleotides. In certain embodiments, conjugate groups are attached near the 5′-end of oligonucleotides.

[0197] Examples of terminal groups include but are not limited to conjugate groups, capping groups, phosphate moieties, protecting groups, modified or unmodified nucleosides, and two or more nucleosides that are independently modified or unmodified.

[0198] A. Certain Conjugate Groups

[0199] In certain embodiments, oligonucleotides are covalently attached to one or more conjugate groups. In certain embodiments, conjugate groups modify one or more properties of the attached oligonucleotide, including but not limited to pharmacodynamics, pharmacokinetics, stability, binding, absorption, tissue distribution, cellular distribution, cellular uptake, charge and clearance. In certain embodiments, conjugate groups impart a new property on the attached oligonucleotide, e.g., fluorophores or reporter groups that enable detection of the oligonucleotide. Certain conjugate groups and conjugate moieties have been described previously, for example: cholesterol moiety (Letsinger et al., Proc. Natl. Acad. Sci. USA, 1989, 86, 6553-6556), cholic acid (Manoharan et al., Bioorg. Med. Chem. Lett., 1994, 4, 1053-1060), a thioether, e.g., hexyl-S-tritylthiol (Manoharan et al., Ann. N.Y. Acad. Sci., 1992, 660, 306-309; Manoharan et al., Bioorg. Med. Chem. Lett., 1993, 3, 2765-2770), a thiocholesterol (Oberhauser et al., Nucl. Acids Res., 1992, 20, 533-538), an aliphatic chain, e.g., do-decan-diol or undecyl residues (Saison-Behmoaras et al., EMBO J., 1991, 10, 1111-1118; Kabanov et al., FEBS Lett., 1990, 259, 327-330; Svinarchuk et al., Biochimie, 1993, 75, 49-54), a phospholipid, e.g., di-hexadecyl-rac-glycerol or triethyl-ammonium 1,2-di-O-hexadecyl-rac-glycero-3-H-phosphonate (Manoharan et al., Tetrahedron Lett., 1995, 36, 3651-3654; Shea et al., Nucl. Acids Res., 1990, 18, 3777-3783), a polyamine or a polyethylene glycol chain (Manoharan et al., Nucleosides & Nucleotides, 1995, 14, 969-973), or adamantane acetic acid a palmityl moiety (Mishra et al., Biochim. Biophys. Acta, 1995, 1264, 229-237), an octadecylamine or hexylamino-carbonyl-oxycholesterol moiety (Crooke et al., J. Pharmacol. Exp. Ther., 1996, 277, 923-937), a tocopherol group (Nishina et al., Molecular Therapy Nucleic Acids, 2015, 4, e220; and Nishina et al., Molecular Therapy, 2008, 16, 734-740), or a GalNAc cluster (e.g., WO2014/179620).

[0200] In certain embodiments, conjugate groups may be selected from any of a C22 alkyl, C20 alkyl, C16 alkyl, C10 alkyl, C21 alkyl, C19 alkyl, C18 alkyl, C15 alkyl, C14 alkyl, C13 alkyl, C12 alkyl, C11 alkyl, C9 alkyl, C8 alkyl, C7 alkyl, C6 alkyl, C5 alkyl, C22 alkenyl, C20 alkenyl, C16 alkenyl, C10 alkenyl, C21 alkenyl, C19 alkenyl, C18 alkenyl, C15 alkenyl, C14 alkenyl, C13 alkenyl, C12 alkenyl, C11 alkenyl, C9 alkenyl, C8 alkenyl, C7 alkenyl, C6 alkenyl, or C5 alkenyl.

[0201] In certain embodiments, conjugate groups may be selected from any of C22 alkyl, C20 alkyl, C16 alkyl, C10 alkyl, C21 alkyl, C19 alkyl, C18 alkyl, C15 alkyl, C14 alkyl, C13 alkyl, C12 alkyl, C11 alkyl, C9 alkyl, C8 alkyl, C7 alkyl, C6 alkyl, and C5 alkyl, where the alkyl chain has one or more unsaturated bonds.

[0202] 1. Conjugate Moieties

[0203] Conjugate moieties include, without limitation, intercalators, reporter molecules, polyamines, polyamides, peptides, carbohydrates, vitamin moieties, polyethylene glycols, thioethers, polyethers, cholesterols, thiocholesterols, cholic acid moieties, folate, lipids, phospholipids, biotin, phenazine, phenanthridine, anthraquinone, adamantane, acridine, fluoresceins, rhodamines, coumarins, fluorophores, and dyes.

[0204] In certain embodiments, a conjugate moiety comprises an active drug substance, for example, aspirin, warfarin, phenylbutazone, ibuprofen, suprofen, fen-bufen, ketoprofen, (S)-(+)-pranoprofen, carprofen, dansylsarcosine, 2,3,5-triiodobenzoic acid, fingolimod, flufenamic acid, folinic acid, a benzothiadiazide, chlorothiazide, a diazepine, indo-methicin, a barbiturate, a cephalosporin, a sulfa drug, an antidiabetic, an antibacterial or an antibiotic.

[0205] 2. Conjugate Linkers

[0206] Conjugate moieties are attached to oligonucleotides through conjugate linkers. In certain oligomeric compounds, the conjugate linker is a single chemical bond (i.e., the conjugate moiety is attached directly to an oligonucleotide through a single bond). In certain embodiments, the conjugate linker comprises a chain structure, such as a hydrocarbyl chain, or an oligomer of repeating units such as ethylene glycol, nucleosides, or amino acid units.

[0207] In certain embodiments, a conjugate linker comprises one or more groups selected from alkyl, amino, oxo, amide, disulfide, polyethylene glycol, ether, thioether, and hydroxylamino. In certain such embodiments, the conjugate linker comprises groups selected from alkyl, amino, oxo, amide and ether groups. In certain embodiments, the conjugate linker comprises groups selected from alkyl and amide groups. In certain embodiments, the conjugate linker comprises groups selected from alkyl and ether groups. In certain embodiments, the conjugate linker comprises at least one phosphorus moiety. In certain embodiments, the conjugate linker comprises at least one phosphate group. In certain embodiments, the conjugate linker includes at least one neutral linking group.

[0208] In certain embodiments, conjugate linkers, including the conjugate linkers described above, are bifunctional linking moieties, e.g., those known in the art to be useful for attaching conjugate groups to parent compounds, such as the oligonucleotides provided herein. In general, a bifunctional linking moiety comprises at least two functional groups. One of the functional groups is selected to bind to a particular site on a parent compound and the other is selected to bind to a conjugate group. Examples of functional groups used in a bifunctional linking moiety include but are not limited to electrophiles for reacting with nucleophilic groups and nucleophiles for reacting with electrophilic groups. In certain embodiments, bifunctional linking moieties comprise one or more groups selected from amino, hydroxyl, carboxylic acid, thiol, alkyl, alkenyl, and alkynyl.

[0209] Examples of conjugate linkers include but are not limited to pyrrolidine, 8-amino-3,6-dioxaoctanoic acid (ADO), succinimidyl 4-(N-maleimidomethyl) cyclohexane-1-carboxylate (SMCC) and 6-aminohexanoic acid (AHEX or AHA). Other conjugate linkers include but are not limited to substituted or unsubstituted C₁-C₁₀ alkyl, substituted or unsubstituted C₂-C₁₀ alkenyl or substituted or unsubstituted C₂-C₁₀ alkynyl, wherein a nonlimiting list of preferred substituent groups includes hydroxyl, amino, alkoxy, carboxy, benzyl, phenyl, nitro, thiol, thioalkoxy, halogen, alkyl, aryl, alkenyl and alkynyl.

[0210] In certain embodiments, conjugate linkers comprise 1-10 linker-nucleosides. In certain embodiments, conjugate linkers comprise 2-5 linker-nucleosides. In certain embodiments, conjugate linkers comprise exactly 3 linker-nucleosides. In certain embodiments, conjugate linkers comprise the TCA motif. In certain embodiments, such linker-nucleosides are modified nucleosides. In certain embodiments such linker-nucleosides comprise a modified sugar moiety. In certain embodiments, linker-nucleosides are unmodified. In certain embodiments, linker-nucleosides comprise an optionally protected heterocyclic base selected from a purine, substituted purine, pyrimidine or substituted pyrimidine. In certain embodiments, a cleavable moiety is a nucleoside selected from uracil, thymine, cytosine, 4-N-benzoylcytosine, 5-methyl cytosine, 4-N-benzoyl-5-methyl cytosine, adenine, 6-N-benzoyladenine, guanine and 2-N-isobutyrylguanine. It is typically desirable for linker-nucleosides to be cleaved from the oligomeric compound after it reaches a target tissue. Accordingly, linker-nucleosides are typically linked to one another and to the remainder of the oligomeric compound through cleavable bonds. In certain embodiments, such cleavable bonds are phosphodiester bonds.

[0211] Herein, linker-nucleosides are not considered to be part of the oligonucleotide. Accordingly, in embodiments in which an oligomeric compound comprises an oligonucleotide consisting of a specified number or range of linked nucleosides and/or a specified percent complementarity to a reference nucleic acid and the oligomeric compound also comprises a conjugate group comprising a conjugate linker comprising linker-nucleosides, those linker-nucleosides are not counted toward the length of the oligonucleotide and are not used in determining the percent complementarity of the oligonucleotide for the reference nucleic acid. For example, an oligomeric compound may comprise (1) a modified oligonucleotide consisting of 8-30 nucleosides and (2) a conjugate group comprising 1-10 linker-nucleosides that are contiguous with the nucleosides of the modified oligonucleotide. The total number of contiguous linked nucleosides in such an oligomeric compound is more than 30. Alternatively, an oligomeric compound may comprise a modified oligonucleotide consisting of 8-30 nucleosides and no conjugate group. The total number of contiguous linked nucleosides in such an oligomeric compound is no more than 30. Unless otherwise indicated conjugate linkers comprise no more than 10 linker-nucleosides. In certain embodiments, conjugate linkers comprise no more than 5 linker-nucleosides. In certain embodiments, conjugate linkers comprise no more than 3 linker-nucleosides. In certain embodiments, conjugate linkers comprise no more than 2 linker-nucleosides. In certain embodiments, conjugate linkers comprise no more than 1 linker-nucleoside.

[0212] In certain embodiments, it is desirable for a conjugate group to be cleaved from the oligonucleotide. For example, in certain circumstances oligomeric compounds comprising a particular conjugate moiety are better taken up by a particular cell type, but once the oligomeric compound has been taken up, it is desirable that the conjugate group be cleaved to release the unconjugated or parent oligonucleotide. Thus, certain conjugate linkers may comprise one or more cleavable moieties. In certain embodiments, a cleavable moiety is a cleavable bond. In certain embodiments, a cleavable moiety is a group of atoms comprising at least one cleavable bond. In certain embodiments, a cleavable moiety comprises a group of atoms having one, two, three, four, or more than four cleavable bonds. In certain embodiments, a cleavable moiety is selectively cleaved inside a cell or subcellular compartment, such as a lysosome. In certain embodiments, a cleavable moiety is selectively cleaved by endogenous enzymes, such as nucleases.

[0213] In certain embodiments, a cleavable bond is selected from among: an amide, an ester, an ether, one or both esters of a phosphodiester, a phosphate ester, a carbamate, or a disulfide. In certain embodiments, a cleavable bond is one or both of the esters of a phosphodiester. In certain embodiments, a cleavable moiety comprises a phosphate or phosphodiester. In certain embodiments, the cleavable moiety is a phosphate linkage between an oligonucleotide and a conjugate moiety or conjugate group.

[0214] In certain embodiments, a cleavable moiety comprises or consists of one or more linker-nucleosides. In certain such embodiments, the one or more linker-nucleosides are linked to one another and/or to the remainder of the oligomeric compound through cleavable bonds. In certain embodiments, such cleavable bonds are unmodified phosphodiester bonds. In certain embodiments, a cleavable moiety is 2′-deoxynucleoside that is attached to either the 3′ or 5′-terminal nucleoside of an oligonucleotide by a phosphate internucleoside linkage and covalently attached to the remainder of the conjugate linker or conjugate moiety by a phosphate or phosphorothioate linkage. In certain such embodiments, the cleavable moiety is 2′-deoxyadenosine.

[0215] 3. Cell-Targeting Moieties

[0216] In certain embodiments, a conjugate group comprises a cell-targeting moiety. In certain embodiments, a conjugate group has the general formula:

[chemical structure]

[0217] wherein n is from 1 to about 3, m is 0 when n is 1, m is 1 when n is 2 or greater, j is 1 or 0, and k is 1 or 0.

[0218] In certain embodiments, n is 1, j is 1 and k is 0. In certain embodiments, n is 1, j is 0 and k is 1. In certain embodiments, n is 1, j is 1 and k is 1. In certain embodiments, n is 2, j is 1 and k is 0. In certain embodiments, n is 2, j is 0 and k is 1. In certain embodiments, n is 2, j is 1 and k is 1. In certain embodiments, n is 3, j is 1 and k is 0. In certain embodiments, n is 3, j is 0 and k is 1. In certain embodiments, n is 3, j is 1 and k is 1.

[0219] In certain embodiments, conjugate groups comprise cell-targeting moieties that have at least one tethered ligand. In certain embodiments, cell-targeting moieties comprise two tethered ligands covalently attached to a branching group. In certain embodiments, cell-targeting moieties comprise three tethered ligands covalently attached to a branching group.

[0220] B. Certain Terminal Groups

[0221] In certain embodiments, oligomeric compounds comprise one or more terminal groups. In certain such embodiments, oligomeric compounds comprise a stabilized 5′-phophate. Stabilized 5′-phosphates include, but are not limited to 5′-phosphanates, including, but not limited to 5′-vinylphosphonates. In certain embodiments, terminal groups comprise one or more abasic nucleosides and/or inverted nucleosides. In certain embodiments, terminal groups comprise one or more 2′-linked nucleosides. In certain such embodiments, the 2′-linked nucleoside is an abasic nucleoside.

### III. Oligomeric Duplexes

[0222] In certain embodiments, oligomeric compounds described herein comprise an oligonucleotide, having a nucleobase sequence complementary to that of a target nucleic acid. In certain embodiments, an oligomeric compound is paired with a second oligomeric compound to form an oligomeric duplex. Such oligomeric duplexes comprise a first oligomeric compound having a region complementary to a target nucleic acid and a second oligomeric compound having a region complementary to the first oligomeric compound. In certain embodiments, the first oligomeric compound of an oligomeric duplex comprises or consists of (1) a modified or unmodified oligonucleotide and optionally a conjugate group and (2) a second modified or unmodified oligonucleotide and optionally a conjugate group. Either or both oligomeric compounds of an oligomeric duplex may comprise a conjugate group. The oligonucleotides of each oligomeric compound of an oligomeric duplex may include non-complementary overhanging nucleosides.

### IV. Antisense Activity

[0223] In certain embodiments, oligomeric compounds and oligomeric duplexes are capable of hybridizing to a target nucleic acid, resulting in at least one antisense activity; such oligomeric compounds and oligomeric duplexes are antisense compounds. In certain embodiments, antisense compounds have antisense activity when they reduce or inhibit the amount or activity of a target nucleic acid by 25% or more in the standard cell assay. In certain embodiments, antisense compounds selectively affect one or more target nucleic acid. Such antisense compounds comprise a nucleobase sequence that hybridizes to one or more target nucleic acid, resulting in one or more desired antisense activity and does not hybridize to one or more non-target nucleic acid or does not hybridize to one or more non-target nucleic acid in such a way that results in significant undesired antisense activity.

[0224] In certain antisense activities, hybridization of an antisense compound to a target nucleic acid results in recruitment of a protein that cleaves the target nucleic acid. For example, certain antisense compounds result in RNase H mediated cleavage of the target nucleic acid. RNase H is a cellular endonuclease that cleaves the RNA strand of an RNA:DNA duplex. The DNA in such an RNA:DNA duplex need not be unmodified DNA. In certain embodiments, described herein are antisense compounds that are sufficiently “DNA-like” to elicit RNase H activity. In certain embodiments, one or more non-DNA-like nucleoside in the gap of a gapmer is tolerated.

[0225] In certain antisense activities, an antisense compound or a portion of an antisense compound is loaded into an RNA-induced silencing complex (RISC), ultimately resulting in cleavage of the target nucleic acid. For example, certain antisense compounds result in cleavage of the target nucleic acid by Argonaute. Antisense compounds that are loaded into RISC are RNAi compounds. RNAi compounds may be double-stranded (siRNA) or single-stranded (ssRNA).

[0226] In certain embodiments, hybridization of an antisense compound to a target nucleic acid does not result in recruitment of a protein that cleaves that target nucleic acid. In certain embodiments, hybridization of the antisense compound to the target nucleic acid results in alteration of splicing of the target nucleic acid. In certain embodiments, hybridization of an antisense compound to a target nucleic acid results in inhibition of a binding interaction between the target nucleic acid and a protein or other nucleic acid. In certain embodiments, hybridization of an antisense compound to a target nucleic acid results in alteration of translation of the target nucleic acid.

[0227] Antisense activities may be observed directly or indirectly. In certain embodiments, observation or detection of an antisense activity involves observation or detection of a change in an amount of a target nucleic acid or protein encoded by such target nucleic acid, a change in the ratio of splice variants of a nucleic acid or protein and/or a phenotypic change in a cell or animal.

### V. Certain Target Nucleic Acids

[0228] In certain embodiments, oligomeric compounds comprise or consist of an oligonucleotide comprising a region that is complementary to a target nucleic acid. In certain embodiments, the target nucleic acid is an endogenous RNA molecule. In certain embodiments, the target nucleic acid encodes a protein. In certain such embodiments, the target nucleic acid is selected from: a mature mRNA and a pre-mRNA, including intronic, exonic and untranslated regions. In certain embodiments, the target RNA is a mature mRNA. In certain embodiments, the target nucleic acid is a pre-mRNA. In certain such embodiments, the target region is entirely within an intron. In certain embodiments, the target region spans an intron/exon junction. In certain embodiments, the target region is at least 50% within an intron. In certain embodiments, the target nucleic acid is the RNA transcriptional product of a retrogene. In certain embodiments, the target nucleic acid is a non-coding RNA. In certain such embodiments, the target non-coding RNA is selected from: a long non-coding RNA, a short non-coding RNA, an intronic RNA molecule.

[0229] A. Complementarity/Mismatches to the Target Nucleic Acid

[0230] It is possible to introduce mismatch bases without eliminating activity. For example, Gautschi et al (J. Natl. Cancer Inst. 93:463-471, March 2001) demonstrated the ability of an oligonucleotide having 100% complementarity to the bcl-2 mRNA and having 3 mismatches to the bcl-xL mRNA to reduce the expression of both bcl-2 and bcl-xL in vitro and in vivo. Furthermore, this oligonucleotide demonstrated potent anti-tumor activity in vivo. Maher and Dolnick (Nuc. Acid. Res. 16:3341-3358, 1988) tested a series of tandem 14 nucleobase oligonucleotides, and 28 and 42 nucleobase oligonucleotides comprised of the sequence of two or three of the tandem oligonucleotides, respectively, for their ability to arrest translation of human DHFR in a rabbit reticulocyte assay. Each of the three 14 nucleobase oligonucleotides alone was able to inhibit translation, albeit at a more modest level than the 28 or 42 nucleobase oligonucleotides.

[0231] In certain embodiments, oligonucleotides are complementary to the target nucleic acid over the entire length of the oligonucleotide. In certain embodiments, oligonucleotides are 99%, 95%, 90%, 85%, or 80% complementary to the target nucleic acid. In certain embodiments, oligonucleotides are at least 80% complementary to the target nucleic acid over the entire length of the oligonucleotide and comprise a region that is 100% or fully complementary to a target nucleic acid. In certain embodiments, the region of full complementarity is from 6 to 20, 10 to 18, or 18 to 20 nucleobases in length.

[0232] In certain embodiments, oligonucleotides comprise one or more mismatched nucleobases relative to the target nucleic acid. In certain embodiments, antisense activity against the target is reduced by such mismatch, but activity against a non-target is reduced by a greater amount. Thus, in certain embodiments selectivity of the oligonucleotide is improved. In certain embodiments, the mismatch is specifically positioned within an oligonucleotide having a gapmer motif. In certain embodiments, the mismatch is at position 1, 2, 3, 4, 5, 6, 7, or 8 from the 5′-end of the gap region. In certain embodiments, the mismatch is at position 9, 8, 7, 6, 5, 4, 3, 2, 1 from the 3′-end of the gap region. In certain embodiments, the mismatch is at position 1, 2, 3, or 4 from the 5′-end of the wing region. In certain embodiments, the mismatch is at position 4, 3, 2, or 1 from the 3′-end of the wing region.

[0233] B. PMP22

[0234] In certain embodiments, oligomeric compounds comprise or consist of an oligonucleotide comprising a region that is complementary to a target nucleic acid, wherein the target nucleic acid is PMP22. In certain embodiments, PMP22 nucleic acid has the sequence set forth in SEQ ID NO: 1 (GENBANK Accession No. NM_000304.3), SEQ ID NO: 2 (GENBANK Accession No. NC_000017.11 truncated from nucleotides 15227001 to 15268000), SEQ ID NO: 3 (GENBANK Accession No. NM_153321.2), SEQ ID NO: 4 (GENBANK Accession No. NM_001281455.1), SEQ ID NO: 5 (GENBANK Accession No. NM_001281456.1), SEQ ID NO: 6 (GENBANK Accession No. NR_104017.1), SEQ ID NO:7 (GENBANK Accession No. NR_104018.1), or SEQ ID NO: 8 (GENBANK Accession No. AK300690.1).

[0235] In certain embodiments, contacting a cell with an oligomeric compound complementary to SEQ ID NO: 1, SEQ ID NO: 2, SEQ ID NO: 3, SEQ ID NO: 4, SEQ ID NO: 5, SEQ ID NO: 6, SEQ ID NO: 7, or SEQ ID NO: 8 reduces the amount of PMP22 RNA, and in certain embodiments reduces the amount of PMP22 protein. In certain embodiments, the oligomeric compound consists of a modified oligonucleotide. In certain embodiments, contacting a cell with an oligomeric compound complementary to SEQ ID NO: 1, SEQ ID NO: 2, SEQ ID NO: 3, SEQ ID NO: 4, SEQ ID NO: 5, SEQ ID NO: 6, SEQ ID NO: 7, or SEQ ID NO: 8 results in reduced demyelination and/or reduced axonal damage and/or loss. In certain embodiments, the oligomeric compound consists of a modified oligonucleotide. In certain embodiments, the oligomeric compound consists of a modified oligonucleotide and a conjugate group.

[0236] C. Certain Target Nucleic Acids in Certain Tissues

[0237] In certain embodiments, oligomeric compounds comprise or consist of an oligonucleotide comprising a region that is complementary to a target nucleic acid, wherein the target nucleic acid is expressed in a pharmacologically relevant tissue. In certain embodiments, the pharmacologically relevant tissues are the cells and tissues that comprise the peripheral nervous system. Such tissues include the sciatic, tibial, peroneal, sural, radial, median and ulnar nerves.

### VI. Certain Pharmaceutical Compositions

[0238] In certain embodiments, described herein are pharmaceutical compositions comprising one or more oligomeric compounds. In certain embodiments, the one or more oligomeric compounds each consists of a modified oligonucleotide. In certain embodiments, the pharmaceutical composition comprises a pharmaceutically acceptable diluent or carrier. In certain embodiments, a pharmaceutical composition comprises or consists of a sterile saline solution and one or more oligomeric compound. In certain embodiments, the sterile saline is pharmaceutical grade saline. In certain embodiments, a pharmaceutical composition comprises or consists of one or more oligomeric compound and sterile water. In certain embodiments, the sterile water is pharmaceutical grade water. In certain embodiments, a pharmaceutical composition comprises or consists of one or more oligomeric compound and phosphate-buffered saline (PBS). In certain embodiments, the sterile PBS is pharmaceutical grade PBS. In certain embodiments, a pharmaceutical composition comprises or consists of one or more oligomeric compound and artificial cerebrospinal fluid. In certain embodiments, the artificial cerebrospinal fluid is pharmaceutical grade.

[0239] In certain embodiments, a pharmaceutical composition comprises a modified oligonucleotide and artificial cerebrospinal fluid. In certain embodiments, a pharmaceutical composition consists of a modified oligonucleotide and artificial cerebrospinal fluid. In certain embodiments, a pharmaceutical composition consists essentially of a modified oligonucleotide and artificial cerebrospinal fluid. In certain embodiments, the artificial cerebrospinal fluid is pharmaceutical grade.

[0240] In certain embodiments, pharmaceutical compositions comprise one or more oligomeric compound and one or more excipients. In certain embodiments, excipients are selected from water, salt solutions, alcohol, polyethylene glycols, gelatin, lactose, amylase, magnesium stearate, talc, silicic acid, viscous paraffin, hydroxymethylcellulose and polyvinylpyrrolidone.

[0241] In certain embodiments, oligomeric compounds may be admixed with pharmaceutically acceptable active and/or inert substances for the preparation of pharmaceutical compositions or formulations. Compositions and methods for the formulation of pharmaceutical compositions depend on a number of criteria, including, but not limited to, route of administration, extent of disease, or dose to be administered.

[0242] In certain embodiments, pharmaceutical compositions comprising an oligomeric compound encompass any pharmaceutically acceptable salts of the oligomeric compound, esters of the oligomeric compound, or salts of such esters. In certain embodiments, pharmaceutical compositions comprising oligomeric compounds comprising one or more oligonucleotide, upon administration to an animal, including a human, are capable of providing (directly or indirectly) the biologically active metabolite or residue thereof. Accordingly, for example, the disclosure is also drawn to pharmaceutically acceptable salts of oligomeric compounds, prodrugs, pharmaceutically acceptable salts of such prodrugs, and other bioequivalents. Suitable pharmaceutically acceptable salts include, but are not limited to, sodium and potassium salts. In certain embodiments, prodrugs comprise one or more conjugate group attached to an oligonucleotide, wherein the conjugate group is cleaved by endogenous nucleases within the body.

[0243] Lipid moieties have been used in nucleic acid therapies in a variety of methods. In certain such methods, the nucleic acid, such as an oligomeric compound, is introduced into preformed liposomes or lipoplexes made of mixtures of cationic lipids and neutral lipids. In certain methods, DNA complexes with mono- or poly-cationic lipids are formed without the presence of a neutral lipid. In certain embodiments, a lipid moiety is selected to increase distribution of a pharmaceutical agent to a particular cell or tissue. In certain embodiments, a lipid moiety is selected to increase distribution of a pharmaceutical agent to fat tissue. In certain embodiments, a lipid moiety is selected to increase distribution of a pharmaceutical agent to muscle tissue.

[0244] In certain embodiments, pharmaceutical compositions comprise a delivery system. Examples of delivery systems include, but are not limited to, liposomes and emulsions. Certain delivery systems are useful for preparing certain pharmaceutical compositions including those comprising hydrophobic compounds. In certain embodiments, certain organic solvents such as dimethylsulfoxide are used.

[0245] In certain embodiments, pharmaceutical compositions comprise one or more tissue-specific delivery molecules designed to deliver the one or more pharmaceutical agents of the present invention to specific tissues or cell types. For example, in certain embodiments, pharmaceutical compositions include liposomes coated with a tissue-specific antibody.

[0246] In certain embodiments, pharmaceutical compositions comprise a co-solvent system. Certain of such co-solvent systems comprise, for example, benzyl alcohol, a nonpolar surfactant, a water-miscible organic polymer, and an aqueous phase. In certain embodiments, such co-solvent systems are used for hydrophobic compounds. A non-limiting example of such a co-solvent system is the VPD co-solvent system, which is a solution of absolute ethanol comprising 3% w/v benzyl alcohol, 8% w/v of the nonpolar surfactant Polysorbate 80™ and 65% w/v polyethylene glycol 300. The proportions of such co-solvent systems may be varied considerably without significantly altering their solubility and toxicity characteristics. Furthermore, the identity of co-solvent components may be varied: for example, other surfactants may be used instead of Polysorbate 80™; the fraction size of polyethylene glycol may be varied; other biocompatible polymers may replace polyethylene glycol, e.g., polyvinyl pyrrolidone; and other sugars or polysaccharides may substitute for dextrose.

[0247] In certain embodiments, pharmaceutical compositions are prepared for oral administration. In certain embodiments, pharmaceutical compositions are prepared for buccal administration. In certain embodiments, a pharmaceutical composition is prepared for administration by injection (e.g., intravenous, subcutaneous, intramuscular, intrathecal (IT), intracerebroventricular (ICV), etc.). In certain of such embodiments, a pharmaceutical composition comprises a carrier and is formulated in aqueous solution, such as water or physiologically compatible buffers such as Hanks's solution, Ringer's solution, or physiological saline buffer. In certain embodiments, other ingredients are included (e.g., ingredients that aid in solubility or serve as preservatives). In certain embodiments, injectable suspensions are prepared using appropriate liquid carriers, suspending agents and the like. Certain pharmaceutical compositions for injection are presented in unit dosage form, e.g., in ampoules or in multi-dose containers. Certain pharmaceutical compositions for injection are suspensions, solutions or emulsions in oily or aqueous vehicles, and may contain formulatory agents such as suspending, stabilizing and/or dispersing agents. Certain solvents suitable for use in pharmaceutical compositions for injection include, but are not limited to, lipophilic solvents and fatty oils, such as sesame oil, synthetic fatty acid esters, such as ethyl oleate or triglycerides, and liposomes.

[0248] Under certain conditions, certain compounds disclosed herein act as acids. Although such compounds may be drawn or described in protonated (free acid) form, or ionized and in association with a cation (salt) form, aqueous solutions of such compounds exist in equilibrium among such forms. For example, a phosphate linkage of an oligonucleotide in aqueous solution exists in equilibrium among free acid, anion and salt forms. Unless otherwise indicated, compounds described herein are intended to include all such forms. Moreover, certain oligonucleotides have several such linkages, each of which is in equilibrium. Thus, oligonucleotides in solution exist in an ensemble of forms at multiple positions all at equilibrium. The term “oligonucleotide” is intended to include all such forms. Drawn structures necessarily depict a single form. Nevertheless, unless otherwise indicated, such drawings are likewise intended to include corresponding forms. Herein, a structure depicting the free acid of a compound followed by the term “or salt thereof” expressly includes all such forms that may be fully or partially protonated/de-protonated/in association with a cation. In certain instances, one or more specific cation is identified.

[0249] In certain embodiments, modified oligonucleotides or oligomeric compounds are in aqueous solution with sodium. In certain embodiments, modified oligonucleotides or oligomeric compounds are in aqueous solution with potassium. In certain embodiments, modified oligonucleotides or oligomeric compounds are in PBS. In certain embodiments, modified oligonucleotides or oligomeric compounds are in water. In certain such embodiments, the pH of the solution is adjusted with NaOH and/or HCl to achieve a desired pH.

[0250] Herein, certain specific doses are described. A dose may be in the form of a dosage unit. For clarity, a dose (or dosage unit) of a modified oligonucleotide or an oligomeric compound in milligrams indicates the mass of the free acid form of the modified oligonucleotide or oligomeric compound. As described above, in aqueous solution, the free acid is in equilibrium with anionic and salt forms. However, for the purpose of calculating dose, it is assumed that the modified oligonucleotide or oligomeric compound exists as a solvent-free, sodium-acetate free, anhydrous, free acid. For example, where a modified oligonucleotide or an oligomeric compound is in solution comprising sodium (e.g., saline), the modified oligonucleotide or oligomeric compound may be partially or fully de-protonated and in association with Na+ ions. However, the mass of the protons are nevertheless counted toward the weight of the dose, and the mass of the Na+ ions are not counted toward the weight of the dose. Thus, for example, a dose, or dosage unit, of 10 mg of Compound No. 684267 equals the number of fully protonated molecules that weighs 10 mg. This would be equivalent to 10.6 mg of solvent-free, sodium-acetate free, anhydrous sodiated Compound No. 684267. When an oligomeric compound comprises a conjugate group, the mass of the conjugate group is included in calculating the dose of such oligomeric compound. If the conjugate group also has an acid, the conjugate group is likewise assumed to be fully protonated for the purpose of calculating dose.

### VII. Certain Comparator Compositions

[0251] In certain embodiments, Compound No. 684267, a 3-10-3 cEt gapmer having a sequence (from 5′ to 3′) of ATCTTCAATCAACAGC (SEQ ID NO: 30), wherein each internucleoside linkage is a phosphorothioate internucleoside linkage, each cytosine is a 5-methyl cytosine, and wherein each of nucleosides 1-3 and 14-16 comprise a cEt modified sugar, which was previously described in WO2017156242, incorporated herein by reference, is a comparator compound.

[0252] In certain embodiments, Compound No. 684394, a 3-10-3 cEt gapmer having a sequence (from 5′ to 3′) of ATTATTCAGGTCTCCA (SEQ ID NO: 31), wherein each internucleoside linkage is a phosphorothioate internucleoside linkage, each cytosine is a 5-methyl cytosine, and wherein each of nucleosides 1-3 and 14-16 comprise a cEt modified sugar, which was previously described in WO2017156242, incorporated herein by reference, is a comparator compound.

[0253] As demonstrated in Example 1, Table 2 of WO2017156242, reproduced as Example 12, Table 102 herein, Compound No. 684394 is more efficacious in vivo in transgenic mice than Compound No. 684267. For example, as provided in Table 102 Compound No. 684394 achieved an expression level of 45% control in a multi-dose study (three weekly doses of 50 mg/kg) in C22 transgenic mice, while Compound No. 684267 achieved an expression level of 83% control in a multi-dose study in C22 transgenic mice. Therefore, Compound No. 684394 is an appropriate comparator compound for in vivo efficacy in C22 transgenic mice.

[0254] In certain embodiments, compounds described herein are superior relative to Compound No. 684394 because they demonstrate one or more improved properties, such as, in vivo efficacy.

[0255] For example, as described herein, certain comparator compound Compound No. 923867 is more efficacious in vivo than comparator Compound No. 684394. For example, as provided in Example 12, Compound. No. 923867 achieved an expression level of 34% control (Table 103) in a single-dose (30 mg/kg) study in C22 transgenic mice, whereas comparator Compound No. 684394 achieved an expression level of 73% control in a single-dose (30 mg/kg) study in C22 transgenic mice. Therefore, certain compounds described herein are more efficacious than comparator Compound No. 684394 in this assay.

### VIII. Certain Hotspot Regions

[0256] 1. Nucleobases 4169-4198 of SEQ ID NO: 2

[0257] In certain embodiments, nucleobases 4169-4198 of SEQ ID NO: 2 comprise a hotspot region. In certain embodiments, modified oligonucleotides are complementary within nucleobases 4169-4198 of SEQ ID NO: 2. In certain embodiments, modified oligonucleotides are 16 nucleobases in length. In certain embodiments, modified oligonucleotides are gapmers. In certain embodiments, the gapmers are cEt gapmers. In certain embodiments, the internucleoside linkages of the modified oligonucleotides are phosphorothioate internucleoside linkages.

[0258] The nucleobase sequences of SEQ ID Nos: 1264, 164, and 1842 are complementary within nucleobases 4169-4198 of SEQ ID NO: 2.

[0259] Compounds 885951, 866542, and 923827 are complementary within nucleobases 4169-4198 of SEQ ID NO: 2.

[0260] In certain embodiments, modified oligonucleotides complementary within nucleobases 4169-4198 of SEQ ID NO: 2 achieve at least 60% reduction of PMP22 RNA in vitro in the standard cell assay. In certain embodiments, modified oligonucleotides complementary within nucleobases 4169-4198 of SEQ ID NO: 2 achieve an average of 76% reduction of PMP22 RNA in vitro in the standard cell assay.

[0261] 2. Nucleobases 8812-8907 of SEQ ID NO: 2

[0262] In certain embodiments, nucleobases 8812-8907 of SEQ ID NO: 2 comprise a hotspot region. In certain embodiments, modified oligonucleotides are complementary within nucleobases 8812-8907 of SEQ ID NO: 2. In certain embodiments, modified oligonucleotides are 16 nucleobases in length. In certain embodiments, modified oligonucleotides are gapmers. In certain embodiments, the gapmers are cEt gapmers. In certain embodiments, the internucleoside linkages of the modified oligonucleotides are phosphorothioate internucleoside linkages.

[0263] The nucleobase sequences of SEQ ID Nos: 642, 717, 792, 867, 1018, 1093, 1168, 1242, 1317, 1392, 1468, 1542, 1692, 1767, 4823-4824, 4890-4891, 4950-4952, 5019-5021, 5089-5091, 5157-5159, and 5239-5245 are complementary within nucleobases 8812-8907 of SEQ ID NO: 2.

[0264] Compounds 684174-684189, 718272-718278, and 885469-885482 are complementary within nucleobases 8812-8907 of SEQ ID NO: 2.

[0265] In certain embodiments, modified oligonucleotides complementary within nucleobases 8812-8907 of SEQ ID NO: 2 achieve at least 36% reduction of PMP22 RNA in vitro in the standard cell assay. In certain embodiments, modified oligonucleotides complementary within nucleobases 8812-8907 of SEQ ID NO: 2 achieve an average of 64% reduction of PMP22 RNA in vitro in the standard cell assay.

[0266] 3. Nucleobases 10019-10050 of SEQ ID NO: 2

[0267] In certain embodiments, nucleobases 10019-10050 of SEQ ID NO: 2 comprise a hotspot region. In certain embodiments, modified oligonucleotides are complementary within nucleobases 10019-10050 of SEQ ID NO: 2. In certain embodiments, modified oligonucleotides are 16 nucleobases in length. In certain embodiments, modified oligonucleotides are gapmers. In certain embodiments, the gapmers are cEt gapmers. In certain embodiments, the internucleoside linkages of the modified oligonucleotides are phosphorothioate internucleoside linkages.

[0268] The nucleobase sequences of SEQ ID Nos: 1498, 1573, 1648, 2232, 3956, and 4033 are complementary within nucleobases 10019-10050 of SEQ ID NO: 2.

[0269] Compounds 886131-886133, 923882, and 1210775-1210776 are complementary within nucleobases 10019-10050 of SEQ ID NO: 2.

[0270] In certain embodiments, modified oligonucleotides complementary within nucleobases 10019-10050 of SEQ ID NO: 2 achieve at least 59% reduction of PMP22 RNA in vitro in the standard cell assay. In certain embodiments, modified oligonucleotides complementary within nucleobases 10019-10050 of SEQ ID NO: 2 achieve an average of 76% reduction of PMP22 RNA in vitro in the standard cell assay.

[0271] 4. Nucleobases 11247-11276 of SEQ ID NO: 2

[0272] In certain embodiments, nucleobases 11247-11276 of SEQ ID NO: 2 comprise a hotspot region. In certain embodiments, modified oligonucleotides are complementary within nucleobases 11247-11276 of SEQ ID NO: 2. In certain embodiments, modified oligonucleotides are 16 nucleobases in length. In certain embodiments, modified oligonucleotides are gapmers. In certain embodiments, the gapmers are cEt gapmers. In certain embodiments, the internucleoside linkages of the modified oligonucleotides are phosphorothioate internucleoside linkages.

[0273] The nucleobase sequences of SEQ ID Nos: 601, 676, 2003, 2080, 2157, 2234, 4036, 4112, and 4390 are complementary within nucleobases 11247-11276 of SEQ ID NO: 2.

[0274] Compounds 886178-886179, 923898-923901, 1209945, and 1210858-1210859 are complementary within nucleobases 11247-11276 of SEQ ID NO: 2.

[0275] In certain embodiments, modified oligonucleotides complementary within nucleobases 11247-11276 of SEQ ID NO: 2 achieve at least 54% reduction of PMP22 RNA in vitro in the standard cell assay. In certain embodiments, modified oligonucleotides complementary within nucleobases 11247-11276 of SEQ ID NO: 2 achieve an average of 78% reduction of PMP22 RNA in vitro in the standard cell assay.

[0276] 5. Nucleobases 12058-12096 of SEQ ID NO: 2

[0277] In certain embodiments, nucleobases 12058-12096 of SEQ ID NO: 2 comprise a hotspot region. In certain embodiments, modified oligonucleotides are complementary within nucleobases 12058-12096 of SEQ ID NO: 2. In certain embodiments, modified oligonucleotides are 16 nucleobases in length. In certain embodiments, modified oligonucleotides are gapmers. In certain embodiments, the gapmers are cEt gapmers. In certain embodiments, the internucleoside linkages of the modified oligonucleotides are phosphorothioate internucleoside linkages.

[0278] The nucleobase sequences of SEQ ID Nos: 1127, 1202, 4342, and 4422 are complementary within nucleobases 12058-12096 of SEQ ID NO: 2.

[0279] Compounds 886206-886207 and 1210890-1210891 are complementary within nucleobases 12058-12096 of SEQ ID NO: 2.

[0280] In certain embodiments, modified oligonucleotides complementary within nucleobases 12058-12096 of SEQ ID NO: 2 achieve at least 56% reduction of PMP22 RNA in vitro in the standard cell assay. In certain embodiments, modified oligonucleotides complementary within nucleobases 12058-12096 of SEQ ID NO: 2 achieve an average of 66% reduction of PMP22 RNA in vitro in the standard cell assay.

[0281] 6. Nucleobases 12357-12387 of SEQ ID NO: 2

[0282] In certain embodiments, nucleobases 12357-12387 of SEQ ID NO: 2 comprise a hotspot region. In certain embodiments, modified oligonucleotides are complementary within nucleobases 12357-12387 of SEQ ID NO: 2. In certain embodiments, modified oligonucleotides are 16 nucleobases in length. In certain embodiments, modified oligonucleotides are gapmers. In certain embodiments, the gapmers are cEt gapmers. In certain embodiments, the internucleoside linkages of the modified oligonucleotides are phosphorothioate internucleoside linkages.

[0283] The nucleobase sequences of SEQ ID Nos: 2348, 3078, and 3807 are complementary within nucleobases 12357-12387 of SEQ ID NO: 2.

[0284] Compounds 924272, 1209956, and 1210911 are complementary within nucleobases 12357-12387 of SEQ ID NO: 2.

[0285] In certain embodiments, modified oligonucleotides complementary within nucleobases 12357-12387 of SEQ ID NO: 2 achieve at least 70% reduction of PMP22 RNA in vitro in the standard cell assay. In certain embodiments, modified oligonucleotides complementary within nucleobases 12357-12387 of SEQ ID NO: 2 achieve an average of 81% reduction of PMP22 RNA in vitro in the standard cell assay.

[0286] 7. Nucleobases 15721-15769 of SEQ ID NO: 2

[0287] In certain embodiments, nucleobases 15914-15971 of SEQ ID NO: 2 comprise a hotspot region. In certain embodiments, modified oligonucleotides are complementary within nucleobases 15721-15769 of SEQ ID NO: 2. In certain embodiments, modified oligonucleotides are 16 nucleobases in length. In certain embodiments, modified oligonucleotides are gapmers. In certain embodiments, the gapmers are cEt gapmers. In certain embodiments, the internucleoside linkages of the modified oligonucleotides are phosphorothioate internucleoside linkages.

[0288] The nucleobase sequences of SEQ ID Nos 1282, 1357, 1432, 1855, 1932, 2120, 2197, 2547, 2887, 2963, 3040, 3079, and 3157 are complementary within nucleobases 15721-15769 of SEQ ID NO: 2.

[0289] Compounds 886307-886309, 923955-923957, 924299-924300, 1209984-1209985, and 1211067-1211069 are complementary within nucleobases 15721-15769 of SEQ ID NO: 2.

[0290] In certain embodiments, modified oligonucleotides complementary within nucleobases 15721-15769 of SEQ ID NO: 2 achieve at least 47% reduction of PMP22 RNA in vitro in the standard cell assay. In certain embodiments, modified oligonucleotides complementary within nucleobases 15721-15769 of SEQ ID NO: 2 achieve an average of 67% reduction of PMP22 RNA in vitro in the standard cell assay.

[0291] 8. Nucleobases 15914-15971 of SEQ ID NO: 2

[0292] In certain embodiments, nucleobases 15914-15971 of SEQ ID NO: 2 comprise a hotspot region. In certain embodiments, modified oligonucleotides are complementary within nucleobases 15914-15971 of SEQ ID NO: 2. In certain embodiments, modified oligonucleotides are 16 nucleobases in length. In certain embodiments, modified oligonucleotides are gapmers. In certain embodiments, the gapmers are cEt gapmers. In certain embodiments, the internucleoside linkages of the modified oligonucleotides are phosphorothioate internucleoside linkages.

[0293] The nucleobase sequences of SEQ ID Nos: 383, 458, 532, 2086, 2163, 3504, 3582, 3659, 3737, 4005, and 5147 are complementary within nucleobases 15914-15971 of SEQ ID NO: 2.

[0294] Compounds 684540, 886314-886316, 923959-923960, 1209996, and 1211075-1211078 are complementary within nucleobases 15914-15971 of SEQ ID NO: 2.

[0295] In certain embodiments, modified oligonucleotides complementary within nucleobases 15914-15971 of SEQ ID NO: 2 achieve at least 50% reduction of PMP22 RNA in vitro in the standard cell assay. In certain embodiments, modified oligonucleotides complementary within nucleobases 15914-15971 of SEQ ID NO: 2 achieve an average of 69% reduction of PMP22 RNA in vitro in the standard cell assay.

[0296] 9. Nucleobases 17354-17403 of SEQ ID NO: 2

[0297] In certain embodiments, nucleobases 17354-17403 of SEQ ID NO: 2 comprise a hotspot region. In certain embodiments, modified oligonucleotides are complementary within nucleobases 17354-17403 of SEQ ID NO: 2. In certain embodiments, modified oligonucleotides are 16 nucleobases in length. In certain embodiments, modified oligonucleotides are gapmers. In certain embodiments, the gapmers are cEt gapmers. In certain embodiments, the internucleoside linkages of the modified oligonucleotides are phosphorothioate internucleoside linkages.

[0298] The nucleobase sequences of SEQ ID Nos: 385, 460, 534, 2088, 3815, 3892, and 3969 are complementary within nucleobases 17354-17403 of SEQ ID NO: 2.

[0299] Compounds 886354-886356, 923979, and 1211133-1211135 are complementary within nucleobases 17354-17403 of SEQ ID NO: 2.

[0300] In certain embodiments, modified oligonucleotides complementary within nucleobases 17354-17403 of SEQ ID NO: 2 achieve at least 32% reduction of PMP22 RNA in vitro in the standard cell assay. In certain embodiments, modified oligonucleotides complementary within nucleobases 17354-17403 of SEQ ID NO: 2 achieve an average of 70% reduction of PMP22 RNA in vitro in the standard cell assay.

[0301] 10. Nucleobases 19959-19997 of SEQ ID NO: 2

[0302] In certain embodiments, nucleobases 19959-19997 SEQ ID NO: 2 comprise a hotspot region. In certain embodiments, modified oligonucleotides are complementary within nucleobases 19959-19997 of SEQ ID NO: 2. In certain embodiments, modified oligonucleotides are 16 nucleobases in length. In certain embodiments, modified oligonucleotides are gapmers. In certain embodiments, the gapmers are cEt gapmers. In certain embodiments, the internucleoside linkages of the modified oligonucleotides are phosphorothioate internucleoside linkages.

[0303] The nucleobase sequences of SEQ ID Nos: 1138, 1214, 1288, 1364, 1439, 1514, 1589, 3391, and 5354-5359 are complementary within nucleobases 19959-19997 of SEQ ID NO: 2.

[0304] Compounds 718388-718393, 886444-886450, and 1210044 are complementary within nucleobases 19959-19997 of SEQ ID NO: 2.

[0305] In certain embodiments, modified oligonucleotides complementary within nucleobases 19959-19997 of SEQ ID NO: 2 achieve at least 43% reduction of PMP22 RNA in vitro in the standard cell assay. In certain embodiments, modified oligonucleotides complementary within nucleobases 19959-19997 of SEQ ID NO: 2 achieve an average of 72% reduction of PMP22 RNA in vitro in the standard cell assay.

[0306] 11. Nucleobases 27054-27086 of SEQ ID NO: 2

[0307] In certain embodiments, nucleobases 27084-27086 SEQ ID NO: 2 comprise a hotspot region. In certain embodiments, modified oligonucleotides are complementary within nucleobases 27084-27086 of SEQ ID NO: 2. In certain embodiments, modified oligonucleotides are 16 nucleobases in length. In certain embodiments, modified oligonucleotides are gapmers. In certain embodiments, the gapmers are cEt gapmers. In certain embodiments, the internucleoside linkages of the modified oligonucleotides are phosphorothioate internucleoside linkages.

[0308] The nucleobase sequences of SEQ ID Nos: 4163, 4243, and 4287 are complementary within nucleobases 27084-27086 of SEQ ID NO: 2.

[0309] Compounds 1210167-1210168 and 1211451 are complementary within nucleobases 27084-27086 of SEQ ID NO: 2.

[0310] In certain embodiments, modified oligonucleotides complementary within nucleobases 27084-27086 of SEQ ID NO: 2 achieve at least 63% reduction of PMP22 RNA in vitro in the standard cell assay. In certain embodiments, modified oligonucleotides complementary within nucleobases 27084-27086 of SEQ ID NO: 2 achieve an average of 74% reduction of PMP22 RNA in vitro in the standard cell assay.

[0311] 12. Nucleobases 29734-29761 of SEQ ID NO: 2

[0312] In certain embodiments, nucleobases 29734-29761 of SEQ ID NO: 2 comprise a hotspot region. In certain embodiments, modified oligonucleotides are complementary within nucleobases 29734-29761 of SEQ ID NO: 2. In certain embodiments, modified oligonucleotides are 16 nucleobases in length. In certain embodiments, modified oligonucleotides are gapmers. In certain embodiments, the gapmers are cEt gapmers. In certain embodiments, the internucleoside linkages of the modified oligonucleotides are phosphorothioate internucleoside linkages.

[0313] The nucleobase sequences of SEQ ID Nos: 2856, 2933, 3010, and 3829 are complementary within nucleobases 29734-29761 of SEQ ID NO: 2.

[0314] Compounds 1210206-1210208 and 1211563 are complementary within nucleobases 29734-29761 of SEQ ID NO: 2.

[0315] In certain embodiments, modified oligonucleotides complementary within nucleobases 29734-29761 of SEQ ID NO: 2 achieve at least 46% reduction of PMP22 RNA in vitro in the standard cell assay. In certain embodiments, modified oligonucleotides complementary within nucleobases 29734-29761 of SEQ ID NO: 2 achieve an average of 78% reduction of PMP22 RNA in vitro in the standard cell assay.

[0316] 13. Nucleobases 30528-30558 of SEQ ID NO: 2

[0317] In certain embodiments, nucleobases 30528-30558 of SEQ ID NO: 2 comprise a hotspot region. In certain embodiments, modified oligonucleotides are complementary within nucleobases 30528-30558 of SEQ ID NO: 2. In certain embodiments, modified oligonucleotides are 16 nucleobases in length. In certain embodiments, modified oligonucleotides are gapmers. In certain embodiments, the gapmers are cEt gapmers. In certain embodiments, the internucleoside linkages of the modified oligonucleotides are phosphorothioate internucleoside linkages.

[0318] The nucleobase sequences of SEQ ID Nos: 852, 3707, and 3783 are complementary within nucleobases 30528-30558 of SEQ ID NO: 2.

[0319] Compounds 886718, 1210246, and 1210247 are complementary within nucleobases 30528-30558 of SEQ ID NO: 2.

[0320] In certain embodiments, modified oligonucleotides complementary within nucleobases 30528-30558 of SEQ ID NO: 2 achieve at least 50% reduction of PMP22 RNA in vitro in the standard cell assay. In certain embodiments, modified oligonucleotides complementary within nucleobases 30528-30558 of SEQ ID NO: 2 achieve an average of 79% reduction of PMP22 RNA in vitro in the standard cell assay.

[0321] 14. Nucleobases 30678-30717 of SEQ ID NO: 2

[0322] In certain embodiments, nucleobases 30678-30717 of SEQ ID NO: 2 comprise a hotspot region. In certain embodiments, modified oligonucleotides are complementary within nucleobases 30678-30717 of SEQ ID NO: 2. In certain embodiments, modified oligonucleotides are 16 nucleobases in length. In certain embodiments, modified oligonucleotides are gapmers. In certain embodiments, the gapmers are cEt gapmers. In certain embodiments, the internucleoside linkages of the modified oligonucleotides are phosphorothioate internucleoside linkages.

[0323] The nucleobase sequences of SEQ ID Nos: 1152, 1948, 4292, 4369, and 4942 are complementary within nucleobases 30678-30717 of SEQ ID NO: 2.

[0324] Compounds 684561, 886723, 924117, and 1211596-1211597 are complementary within nucleobases 30678-30717 of SEQ ID NO: 2.

[0325] In certain embodiments, modified oligonucleotides complementary within nucleobases 30678-30717 of SEQ ID NO: 2 achieve at least 33% reduction of PMP22 RNA in vitro in the standard cell assay. In certain embodiments, modified oligonucleotides complementary within nucleobases 30678-30717 of SEQ ID NO: 2 achieve an average of 67% reduction of PMP22 RNA in vitro in the standard cell assay.

[0326] 15. Nucleobases 31450-31479 of SEQ ID NO: 2

[0327] In certain embodiments, nucleobases 31450-31479 of SEQ ID NO: 2 comprise a hotspot region. In certain embodiments, modified oligonucleotides are complementary within nucleobases 31450-31479 of SEQ ID NO: 2. In certain embodiments, modified oligonucleotides are 16 nucleobases in length. In certain embodiments, modified oligonucleotides are gapmers. In certain embodiments, the gapmers are cEt gapmers. In certain embodiments, the internucleoside linkages of the modified oligonucleotides are phosphorothioate internucleoside linkages.

[0328] The nucleobase sequences of SEQ ID Nos: 704, 780, 3536, and 3613 are complementary within nucleobases 31450-31479 of SEQ ID NO: 2.

[0329] Compounds 886756-886757, 1078914, 1078916 are complementary within nucleobases 31450-31479 of SEQ ID NO: 2.

[0330] In certain embodiments, modified oligonucleotides complementary within nucleobases 31450-31479 of SEQ ID NO: 2 achieve at least 49% reduction of PMP22 RNA in vitro in the standard cell assay. In certain embodiments, modified oligonucleotides complementary within nucleobases 31450-31479 of SEQ ID NO: 2 achieve an average of 77% reduction of PMP22 RNA in vitro in the standard cell assay.

[0331] 16. Nucleobases 37363-37401 SEQ ID NO: 2

[0332] In certain embodiments, nucleobases 37363-37401 of SEQ ID NO: 2 comprise a hotspot region. In certain embodiments, modified oligonucleotides are complementary within nucleobases 37363-37401 of SEQ ID NO: 2. In certain embodiments, modified oligonucleotides are 16 nucleobases in length. In certain embodiments, modified oligonucleotides are gapmers. In certain embodiments, the gapmers are cEt gapmers. In certain embodiments, the internucleoside linkages of the modified oligonucleotides are phosphorothioate internucleoside linkages.

[0333] The nucleobase sequences of SEQ ID Nos: 1323, 1398, 1474, 1548, 1623, 272, 347, 425, 500, 575, 4843, 4907, 5014, 5038, 4969, 5082, 5107, 5108, 5177, and 5278 are complementary within nucleobases 37363-37401 of SEQ ID NO: 2.

[0334] Compounds 684295-684301, 684572, 684573, 718314, and 885597-885606 are complementary within nucleobases 37363-37401 of SEQ ID NO: 2.

[0335] In certain embodiments, modified oligonucleotides complementary within nucleobases 37363-37401 of SEQ ID NO: 2 achieve at least 38% reduction of PMP22 RNA in vitro in the standard cell assay. In certain embodiments, modified oligonucleotides complementary within nucleobases 37363-37401 of SEQ ID NO: 2 achieve an average of 66% reduction of PMP22 RNA in vitro in the standard cell assay.

[0336] 17. Nucleobases 37651-37856 of SEQ ID NO: 2

[0337] In certain embodiments, nucleobases 37651-37856 of SEQ ID NO: 2 comprise a hotspot region. In certain embodiments, modified oligonucleotides are complementary within nucleobases 37651-37856 of SEQ ID NO: 2. In certain embodiments, modified oligonucleotides are 16 nucleobases in length. In certain embodiments, modified oligonucleotides are gapmers. In certain embodiments, the gapmers are cEt gapmers. In certain embodiments, the internucleoside linkages of the modified oligonucleotides are phosphorothioate internucleoside linkages.

[0338] The nucleobase sequences of SEQ ID Nos: 350-352, 428-430, 503-505, 566, 578, 579, 652-654, 727-729, 802-804, 877-879, 1028-1030, 1102-1104, 1165, 1178-1179, 1252-1254, 1327-1329, 1401-1403, 1477-1479, 1551-1553, 1626-1628, 1702-1704, 1777-1779, 3940, 4323, 4383, 4850-4857, 4883, 4914-4920, 4944, 4977-4984, 5045-5052, 5116-5123, and 5186-5193 are complementary within nucleobases 37651-37856 of SEQ ID NO: 2.

[0339] Compounds 684343-684391, 684576, 684577, 885658-885715, 1078160, 1210332, and 1210345 are complementary within nucleobases 37651-37856 of SEQ ID NO: 2.

[0340] In certain embodiments, modified oligonucleotides complementary within nucleobases 37651-37856 of SEQ ID NO: 2 achieve at least 16% reduction of PMP22 RNA in vitro in the standard cell assay. In certain embodiments, modified oligonucleotides complementary within nucleobases 37651-37856 of SEQ ID NO: 2 achieve an average of 64% reduction of PMP22 RNA in vitro in the standard cell assay.

[0341] 18. Nucleobases 38107-38223 of SEQ ID NO: 2

[0342] In certain embodiments, nucleobases 38107-38223 of SEQ ID NO: 2 comprise a hotspot region. In certain embodiments, modified oligonucleotides are complementary within nucleobases 38107-38223 of SEQ ID NO: 2. In certain embodiments, modified oligonucleotides are 16 nucleobases in length. In certain embodiments, modified oligonucleotides are gapmers. In certain embodiments, the gapmers are cEt gapmers. In certain embodiments, the internucleoside linkages of the modified oligonucleotides are phosphorothioate internucleoside linkages.

[0343] The nucleobase sequences of SEQ ID Nos: 281, 356, 415, 1482, 1557, 1632, 4864-4866, 4927, 4945, 4995-4997, 5062-5064, 5133-5136, 5203-5205, 5303, 5304, and 5306-5331 are complementary within nucleobases 38107-38223 of SEQ ID NO: 2.

[0344] Compounds 596994, 596996, 597060, 684449-684466, 684578, 718340-718365, and 885775-885779 are complementary within nucleobases 38107-38223 of SEQ ID NO: 2.

[0345] In certain embodiments, modified oligonucleotides complementary within nucleobases 38107-38223 of SEQ ID NO: 2 achieve at least 47% reduction of PMP22 RNA in vitro in the standard cell assay. In certain embodiments, modified oligonucleotides complementary within nucleobases 38107-38223 of SEQ ID NO: 2 achieve an average of 73% reduction of PMP22 RNA in vitro in the standard cell assay.

[0346] 19. Additional Hotspot Regions

[0347] In certain embodiments, nucleobases in the range “start site” to “stop site” in the table below comprise a hotspot region. In certain embodiments, modified oligonucleotides are complementary within nucleobases “start site” to “stop site” SEQ ID NO:2, as indicated in the table below. In certain embodiments, modified oligonucleotides are 16 nucleobases in length. In certain embodiments, modified oligonucleotides are gapmers. In certain embodiments, the gapmers are cEt gapmers. In certain embodiments, the internucleoside linkages of the modified oligonucleotides are phosphorothioate internucleoside linkages.

[0348] The nucleobase sequences of “SEQ ID in range” in the table below are complementary to “start site” to “stop site” of SEQ ID NO:2.

[0349] Compounds “Compounds in range” in the table below are complementary to “start site” to “stop site” of SEQ ID NO:2.

[0350] In certain embodiments, modified oligonucleotides complementary within nucleobases “start site” to “stop site” of SEQ ID NO: 2, achieve at least “Min. % reduction” of PMP22 RNA in vitro in the standard cell assay, as indicated in the table below. In certain embodiments, modified oligonucleotides complementary within nucleobases “start site” to “stop site” of SEQ ID NO: 2 achieve an average of “Avg. % reduction” of PMP22 RNA in vitro in the standard cell assay, as indicated in the table below. In certain embodiments, modified oligonucleotides complementary within nucleobases “start site” to “stop site” of SEQ ID NO: 2 achieve a maximum of “Max % reduction” of PMP22 RNA in vitro in the standard cell assay, as indicated in the table below.

Hotspot Regions

| Start | Stop | Min. % | Max. % | Avg. % | | |
|---|---|---|---|---|---|---|
| Site | Site | Reduction | Reduction | Reduction | Compound ID in range | SEQ ID in range |
| 2691 | 2714 | 29 | 82 | 58 | 684119, 866375-866382 | 46-47, 123-124, 199-200, 941, 954-955 |
| 2880 | 2901 | 31 | 77 | 54 | 885922-885923, 866452-866454 | 65, 142, 663, 738, 973 |
| 3069 | 3095 | 26 | 76 | 52 | 885928-885929, 866468 | 69, 1113, 1788 |
| 3626 | 3659 | 30 | 75 | 53 | 885941, 866512-866513, 923819 | 80, 589, 988, 1995 |
| 3781 | 3802 | 75 | 86 | 80 | 885942-885943, 923820 | 664, 739, 2072 |
| 4169 | 4198 | 46 | 86 | 76 | 885951, 886542, 923827 | 164, 1264, 1842 |
| 4357 | 4388 | 19 | 87 | 58 | 885952-885954, 866556-866558 | 91, 168, 999, 1339, 1414, 1489 |
| 5942 | 5969 | 19 | 82 | 57 | 886001-886002, 923837-923838, 1210521 | 816, 890, 1843, 1920, 3176 |
| 7230 | 7334 | 11 | 98 | 61 | 684150-684166, 684508-684509, | 338-339, 416-417, 491-492, 511, 567-568, |
| | | | | | 866442, 885424-885457, 885860-885864 | 586, 640-641, 661, 715-716, 736, 790-791, |
| | | | | | | 811, 865-866, 970, 1016-1017, 1091-1092, |
| | | | | | | 1166-1167, 1240, 1315, 1390, 1466, 1540, |
| | | | | | | 1615, 1690-1691, 1765-1766, 4812-4813, |
| | | | | | | 4886-4887, 4946-4948, 5015-5017, |
| | | | | | | 5085-5087, 5141, 5153-5155, 5211 |
| 7588 | 7609 | 48 | 73 | 60 | 886052, 923845 | 1569, 2459 |
| 7618 | 7647 | 31 | 80 | 60 | 886053, 923846-923848 | 1644, 1844, 1921, 2536 |
| 8621 | 8662 | 43 | 73 | 55 | 684529, 1209906-1209909, 1210669 | 3540, 3617, 3695, 3771, 3798, 5215 |
| 8807 | 8907 | 31 | 91 | 62 | 684174-684189, 718272-718278, 885466- | 361, 418, 493, 569, 642, 717, 792, 867, |
| | | | | | 885482, 885878 | 1018, 1093, 1168, 1242, 1317, 1392, 1468, |
| | | | | | | 1542, 1692, 1767, 4823, 4824, 4890, 4891, |
| | | | | | | 4950-4952, 5019-5021, 5089-5091, 5157- |
| | | | | | | 5159, 5239-5245 |
| 9107 | 9129 | 52 | 88 | 66 | 886092-886093, 923862, 1210692-1210693 | 1571, 1646, 2230, 3414, 3491 |
| 9241 | 9262 | 73 | 99 | 86 | 886101, 1210724 | 821, 3724 |
| 9431 | 9463 | 54 | 84 | 71 | 886106, 1209915, 1210733 | 1122, 4234, 4417 |
| 9486 | 9512 | 23 | 79 | 54 | 886110-886111, 923865, 1076612-1076616, | 1422, 1497, 2461, 2997, 3074, 3151, 3228, |
| | | | | | 1076619-1076620 | 3305, 3382, 3459 |
| 9522 | 9551 | 52 | 81 | 71 | 1210742-1210744 | 3570, 3647, 3725 |
| 9709 | 9732 | 47 | 89 | 67 | 886116-886117, 923871-923873, 1209917, | 448, 522, 2155, 2231, 2308, 4338, 4389, |
| | | | | | 1210752-1210753 | 4418 |
| 9830 | 9863 | 12 | 97 | 60 | 886124-886125, 923880-923881, 1209919- | 1723, 1798, 2078, 2156, 2617, 2800, 2876, |
| | | | | | 1209922, 1210760-1210761 | 4463, 4542, 4694 |
| 9867 | 9888 | 39 | 91 | 66 | 886126, 1209923, 1210762-1210764 | 1123, 2693, 2952, 3029, 3106 |
| 9928 | 9950 | 37 | 78 | 51 | 886127, 924235, 1210769-1210771 | 1198, 2575, 3493, 3571, 3648 |
| 10019 | 10050 | 62 | 96 | 76 | 886131-886133, 923882, 1210775-1210776 | 1498, 1573, 1648, 2232, 3956, 4033 |
| 10231 | 10252 | 31 | 91 | 63 | 886137, 924238-924240, 12105151, | 523, 2037, 2114, 2191, 4306, 4384 |
| | | | | | 1205153 | |
| 10360 | 10408 | 43 | 83 | 63 | 718381-718382, 886139-886141, 924241- | 674, 749, 823, 2268, 2345, 2724, 2801, |
| | | | | | 924242, 1210785-1210787 | 2877, 5347-5348 |
| 10452 | 10494 | 18 | 92 | 51 | 886146-886148, 923888-923890, 1210797- | 1124, 1199, 1274, 1925, 2002, 2079, 3649, |
| | | | | | 1210801 | 3727, 3803, 3880, 3957 |
| 10657 | 10684 | 18 | 93 | 56 | 684532, 886154-886155, 924245, 1209937, | 298, 375, 2576, 3108, 3186, 3263, 3772, |
| | | | | | 1210818-1210820 | 5007 |
| 10710 | 10733 | 43 | 87 | 64 | 886156, 886954, 923891 | 450, 2149, 2233 |
| 10748 | 10782 | 28 | 70 | 53 | 886159-886160, 923896-923897, 1210823- | 675, 750, 1849, 1926, 3495, 3573 |
| | | | | | 1210824 | |
| 10907 | 10931 | 28 | 99 | 53 | 886166-886167, 924247-924248, 1210829- | 1125, 1200, 1961, 2038, 3958, 4035, 4111 |
| | | | | | 1210831 | |
| 10992 | 11022 | 48 | 69 | 58 | 886168-886169, 1210834 | 1275, 1350, 4340 |
| 11086 | 11108 | 24 | 99 | 53 | 886172, 1209939, 1210837 | 1575, 3926, 4726 |
| 11183 | 11206 | 12 | 96 | 65 | 886177, 1209944, 1210853-1210856 | 525, 3651, 3729, 3805, 3882, 4309 |
| 11247 | 11276 | 54 | 92 | 78 | 886178-886179, 923898-923901, 1209945, | 601, 676, 2003, 2080, 2157, 2234, 4036, |
| | | | | | 1210858-1210859 | 4112, 4390 |
| 11263 | 11284 | 35 | 85 | 60 | 886180, 923903-923907, 1209946 | 751, 1850, 1927, 2388, 2465, 2542, 4618 |
| 11764 | 11796 | 38 | 65 | 52 | 886189-886191, 924259-924260, 1210868- | 1351, 1426, 1501, 2116, 2193, 2651, 2727 |
| | | | | | 1210869 | |
| 11860 | 11887 | 20 | 87 | 57 | 886194-886196, 923908-923911, | 300, 377, 452, 2004, 2081, 2158, 2235, |
| | | | | | 1010872-1210875 | 2956, 3033, 3110, 3188 |
| 12013 | 12035 | 71 | 86 | 79 | 1210885-1210887 | 3960, 4037, 4113 |
| 12058 | 12096 | 56 | 81 | 66 | 886206-886207, 1210890-1210891 | 1127, 1202, 4342, 4422 |
| 12357 | 12387 | 70 | 91 | 81 | 924272, 1209956, 1210911 | 2348, 3078, 3807 |
| 12477 | 12502 | 48 | 61 | 54 | 886218, 1210917-1210918 | 603, 4269, 4343 |
| 12574 | 12602 | 22 | 67 | 51 | 886219-886220, 923918-923919, | 678, 753, 2005, 2082, 4652, 4729 |
| | | | | | 1210920-1210921 | |
| 12660 | 12683 | 20 | 84 | 58 | 886221, 923920, 1210923-1210924 | 827, 2159, 2653, 4577 |
| 12742 | 12787 | 13 | 94 | 63 | 886224-886226, 923921, 1209958, | 1128, 1728, 1803, 2236, 2958, 3035, 3112, |
| | | | | | 1210928-1210931 | 3190, 3233 |
| 12856 | 12878 | 35 | 77 | 51 | 886230-886231, 1210936-1210937 | 1428, 1503, 3577, 3654 |
| 13006 | 13028 | 29 | 85 | 62 | 886235, 1209960, 1210941-1210944 | 379, 3388, 3962, 4039, 4115, 4191 |
| 13527 | 13559 | 42 | 70 | 53 | 886237-886239, 1210952 | 528, 604, 679, 2654 |
| 13760 | 13782 | 52 | 85 | 68 | 924278, 1209961 | 2041, 3465 |
| 13842 | 13900 | 22 | 69 | 52 | 886251-886255, 923926-923929, | 303, 380, 1504, 1579, 1654, 1852, 1929, |
| | | | | | 1210970-1210974 | 2006, 2083, 4040, 4116, 4192, 4271, 4345 |
| 14093 | 14115 | 20 | 87 | 55 | 886262, 1209962, 1210990-1210991 | 903, 3424, 3501, 3542 |
| 14212 | 14242 | 49 | 69 | 59 | 886266-886270, 923938-923941 | 1130, 1205, 1280, 1355, 1430, 2007, 2084, |
| | | | | | | 2161, 2238 |
| 14344 | 14376 | 27 | 80 | 59 | 886275, 121103-121105 | 381, 4426, 4655, 4732 |
| 14985 | 15006 | 73 | 99 | 87 | 1209967-1209969, 1211036 | 2657, 3927, 4004, 4080 |
| 15378 | 15406 | 53 | 85 | 72 | 886300-886301, 1209972-1209973, | 757, 831, 3889, 4310, 4391 |
| | | | | | 1211052 | |
| 15721 | 15769 | 47 | 93 | 67 | 886307-886309, 923955-923957, 924299- | 1282, 1357, 1432, 1855, 1932, 2120, 2197, |
| | | | | | 924300, 1209984-1209985, 1211067- | 2547, 2887, 2963, 3040, 3079, 3157 |
| | | | | | 1211069 | |
| 15855 | 15888 | 52 | 76 | 62 | 1209990-1209994 | 3543, 3620, 3698, 3774, 3852 |
| 15914 | 15971 | 50 | 89 | 69 | 684540, 886314-886316, 923959-923960, | 383, 458, 532, 2086, 2163, 3504, 3582, |
| | | | | | 1209996, 1211075-1211078 | 3659, 3737, 4005, 5147 |
| 15974 | 16020 | 47 | 79 | 60 | 886317-886318, 923961-923962, 1211079- | 608, 683, 2240, 2317, 3813, 3890, 3967, |
| | | | | | 1211083 | 4044, 4120 |
| 16104 | 16135 | 56 | 91 | 70 | 886322, 923969-923971, 1209997-1209998, | 1058, 2087, 2164, 2241, 4081, 4157, 4504 |
| | | | | | 1211090 | |
| 16228 | 16253 | 23 | 74 | 50 | 886325-886326, 1209999 | 1132, 1208, 4237 |
| 16428 | 16478 | 11 | 85 | 56 | 886330-886331, 923974, 1211095-1211098 | 1508, 1583, 2472, 2888, 2964, 3041, 3118 |
| 16428 | 16454 | 61 | 85 | 72 | 886330-886331, 1211095 | 1508, 1583, 2888 |
| 16546 | 16567 | 21 | 75 | 56 | 886334-886335, 1210003, 1211103-1211104 | 384, 459, 3505, 3583, 4697 |
| 16693 | 16724 | 41 | 72 | 60 | 886338, 1210006-1210007 | 684, 2620, 2696 |
| 16718 | 16749 | 48 | 69 | 60 | 886340-886341, 1211112-1211113 | 833, 907, 4197, 4276 |
| 17106 | 17136 | 13 | 99 | 56 | 886347-886348, 923978, 1211125-1211126 | 1284, 1359, 2011, 3197, 3274 |
| 17354 | 17403 | 32 | 99 | 68 | 886354-886356, 923979, 1211133-1211135 | 385, 460, 534, 2088, 3815, 3892, 3969 |
| 17578 | 17601 | 40 | 79 | 55 | 886362, 923980-923982, 1210014, 1211142 | 1060, 2165, 2242, 2319, 3235, 4737 |
| 18260 | 18281 | 56 | 76 | 66 | 886373, 1211154 | 309, 3352 |
| 18452 | 18485 | 42 | 85 | 63 | 886378-886379, 923988, 1211159 | 686, 761, 2012, 3740 |
| 18515 | 18538 | 55 | 77 | 68 | 886380, 923989-923991, 1211160 | 835, 2089, 2166, 2243, 3816 |
| 18674 | 18695 | 33 | 80 | 55 | 886384-886386, 121174 | 1135, 1211, 1811, 2738 |
| 18697 | 18721 | 32 | 71 | 53 | 886388-886391 | 1361, 1436, 1511, 1586 |
| 18920 | 18942 | 49 | 58 | 54 | 886399, 924326-924327, 1211192-1211193 | 762, 1892, 1969, 4124, 4200 |
| 19019 | 19045 | 38 | 66 | 50 | 886403, 924331-924333, 1211199-1211202 | 1737, 2277, 2354, 2431, 2663, 2739, |
| | | | | | | 4508, 4586 |
| 19084 | 19107 | 31 | 71 | 52 | 886407, 923996-923999 | 1287, 1859, 1936, 2013, 2090 |
| 19098 | 19119 | 64 | 92 | 71 | 1211214-1211217 | 3972, 4049, 4125, 4201 |
| 19159 | 19181 | 46 | 90 | 71 | 886409, 92400-924003 | 1437, 2167, 2244, 2321, 2398 |
| 19172 | 19201 | 45 | 97 | 74 | 924008, 1210020-1210021, 1211219 | 2014, 3699, 3775, and 4354 |
| 19216 | 19251 | 32 | 88 | 69 | 1210022, 1211222-1211224 | 3853, 4509, 4587, 4740 |
| 19258 | 19282 | 39 | 96 | 65 | 886412-886413, 924013-924017, 1210024, | 311, 1662, 1861, 1938, 2399, 2476, |
| | | | | | 1211227-1211228 | 2553, 2817, 2893, 4006 |
| 19307 | 19355 | 36 | 78 | 60 | 886414-886416, 924018, 1210025- | 388, 463, 537, 2015, 3046, 3123, 4082, |
| | | | | | 1210026, 1211230-1211231 | 4158 |
| 19405 | 19462 | 11 | 90 | 57 | 886419-886421, 924335-924341, 1210030- | 763, 837, 911, 1893, 1970, 2047, 2124, |
| | | | | | 1210033, 1211234-1211237 | 2201, 2278, 2585, 3355, 3433, 3509, |
| | | | | | | 3587, 4467, 4546, 4621, 4698 |
| 19495 | 19539 | 42 | 87 | 61 | 886422-886424, 924019, 1205175, 1211238 | 1063, 1738, 1813, 2092, 3664, 3693 |
| 19553 | 19585 | 43 | 88 | 63 | 886425-886426, 1210035-1210036 | 1137, 1213, 2697, 2774 |
| 19594 | 19629 | 43 | 83 | 63 | 886427-886428, 924021-924023, | 1363, 1438, 2246, 2323, 2400, 3819, |
| | | | | | 1211239-1211240 | 3896 |
| 19753 | 19791 | 41 | 76 | 54 | 886436-886437, 924342, 1210043, | 614, 689, 2355, 3313, 4355, 4434 |
| | | | | | 1211246-1211247 | |
| 19781 | 19808 | 13 | 76 | 51 | 886438-886439, 924029-924032, | 764, 838, 2093, 2170, 2247, 2324, 4510, |
| | | | | | 1211249-1211251 | 4588, 4741 |
| 19959 | 19997 | 43 | 96 | 72 | 718388-718393, 886444-886450, 1210044 | 1138, 1214, 1288, 1364, 1439, 1514, |
| | | | | | | 1589, 3391, 5354-5359 |
| 20558 | 20580 | 41 | 77 | 54 | 886469, 1211292 | 1515, 3589 |
| 21244 | 21274 | 38 | 78 | 61 | 886472-886473, 924354, 1211297-1211298 | 314, 391, 2510, 3975, 4052 |
| 21423 | 21447 | 70 | 75 | 72 | 924355, 1210049 | 2587, 3776 |
| 21454 | 21477 | 60 | 72 | 67 | 886482-886483, 1211306 | 1741, 1816, 4512 |
| 21600 | 21625 | 30 | 81 | 61 | 886489-886490, 924049-924050, | 1516, 1591, 2095, 2172, 2743, 2820, |
| | | | | | 1210058-1210059, 1211309-1211311 | 2896, 4622, 4699 |
| 21746 | 21767 | 39 | 86 | 65 | 886493-886494, 924054-924055 | 392, 467, 2480, 2557 |
| 21910 | 21933 | 29 | 91 | 58 | 886497-886498, 924364, 1210064- | 767, 841, 2511, 2775, 2851, 3822 |
| | | | | | 1210065, 1211323 | |
| 22444 | 22472 | 27 | 93 | 69 | 886504, 924370, 1205180, 1210066- | 1217, 2204, 2928, 3005, 4358, 4386 |
| | | | | | 1210067, 1211330 | |
| 22581 | 22605 | 53 | 78 | 65 | 1211337-1211338 | 2821, 2897 |
| 23148 | 23178 | 46 | 75 | 61 | 886524, 924384, 1210072-1210075 | 1218, 2513, 3392, 3469, 3546, 3623 |
| 23195 | 23243 | 45 | 76 | 61 | 886527-886529, 924059-924061, | 1443, 1518, 1593, 2096, 2173, 2250, |
| | | | | | 1210077 | 3777 |
| 23258 | 23287 | 65 | 73 | 69 | 886530, 1210079 | 1668, 3931 |
| 23441 | 23473 | 42 | 85 | 65 | 886533, 924062, 1210087 1211365- | 469, 2327, 2898, 2974, 3051, 3128, |
| | | | | | 1211368 | 4623 |
| 23535 | 23567 | 38 | 68 | 52 | 886537, 924068-924069, 1210092 | 769, 2020, 2097, 2699 |
| 23695 | 23716 | 43 | 71 | 59 | 886539, 1210095-1210097, 1211373- | 917, 2929, 3006, 3083, 3514, 3592 |
| | | | | | 1211374 | |
| 23938 | 23966 | 36 | 85 | 61 | 886544, 924389, 1205187, 1205190, | 1219, 2129, 3624, 3702, 3901, 3922, |
| | | | | | 1210104-1210105, 1211377-1211378 | 3999, 4131 |
| 23987 | 24010 | 30 | 81 | 52 | 886546, 924390, 1205199, 1210106- | 1369, 2206, 3778, 3856, 4230, 4360 |
| | | | | | 1210107, 1211380 | |
| 24439 | 24462 | 37 | 74 | 58 | 924396, 1205214, 1210112-1210113 | 1899, 2767, 4241, 4315 |
| 24938 | 24959 | 76 | 85 | 80 | 1210118-1210119, 1211396 | 2624, 3747, 4549 |
| 25287 | 25319 | 50 | 80 | 64 | 1210123-1210126 | 2930, 3007, 3084, 3162 |
| 25480 | 25514 | 35 | 71 | 51 | 886572-886573, 924408, 1211408 | 396, 471, 2054, 4516 |
| 25702 | 25726 | 43 | 67 | 58 | 886577, 924411, 1211409-1211412 | 771, 2285, 2670, 2746, 2823, 4594 |
| 26018 | 26080 | 29 | 77 | 53 | 886578-886579, 1210127-1210128, | 845, 919, 2900, 2976, 3053, 3130, 3208, |
| | | | | | 1211413-1211417 | 3239, 3316 |
| 26210 | 26231 | 38 | 85 | 59 | 886584, 1210133, 1211420 | 1221, 3439, 3703 |
| 26227 | 26257 | 11 | 85 | 50 | 924417-924418, 1210135-1210142, | 1978, 2055, 3516, 3594, 3857, 3933, 4010, |
| | | | | | 1211421-1211422 | 4086, 4162, 4242, 4316, 4397 |
| 26444 | 26470 | 43 | 85 | 60 | 1210149, 1211432-1211433 | 2778, 4286, 4362 |
| 26667 | 26717 | 56 | 62 | 58 | 684555, 1205231, 1210153, 1211438 | 2824, 2843, 3085, 5150 |
| 26906 | 26936 | 49 | 90 | 74 | 718395-718396, 886601-8786607 | 1146, 1222, 1296, 1372, 1447, 1747, 1822, |
| | | | | | | 5361, 5362 |
| 27054 | 27086 | 63 | 89 | 78 | 1210167-1210168, 1211451 | 4163, 4243, 4287 |
| 27155 | 27176 | 48 | 76 | 62 | 886614, 1211453 | 547, 4440 |
| 27590 | 27631 | 24 | 78 | 58 | 886627-886628, 924085, 924440, 1210174- | 1448, 1523, 2211, 2560, 2626, 3826, 3904, |
| | | | | | 1210175, 1211473-1211474 | 4551 |
| 27620 | 27650 | 43 | 74 | 58 | 886629-886630, 924089-924094, 1211475 | 1598, 1673, 2099, 2176, 2253, 2330, 2407, |
| | | | | | | 2484, 3980 |
| 28386 | 28436 | 22 | 90 | 53 | 597005, 684191-684199, 718279-718281, | 1617, 4815, 4826, 4892-4893, 4953-4954, |
| | | | | | 718398-718399, 885483, 885484 | 5022-5023, 5084, 5160, 5246-5248, 5364-5365 |
| 28557 | 28584 | 51 | 94 | 69 | 886645-886646, 1211501 | 1298, 1374, 3827 |
| 28798 | 28859 | 13 | 91 | 61 | 886652-886653, 924095, 1120799-1120807, | 400, 475, 2561, 3383, 3461, 3538, 3615, |
| | | | | | 1120810, 1211515-1211518 | 3692, 3767, 3844, 3921, 3998, 4075, 4152, |
| | | | | | | 4231, 4366, 4443, 4520, 4615, 4751 |
| 28954 | 28990 | 23 | 79 | 58 | 886663-886665, 1210193-1210194, | 1149, 1225, 1299, 3135, 3212, 4012, 4088 |
| | | | | | 1211526-1211527 | |
| 29258 | 29332 | 20 | 84 | 50 | 684512, 684514-684515, 684518-684520, | 550, 626, 700, 776, 850, 2520, 2597, 5004- |
| | | | | | 886674-886678, 924454-924455 | 5005, 5073, 5142-5143, 5213 |
| 29342 | 29365 | 48 | 78 | 64 | 684513, 684516, 684517, 886679-886680, | 924, 1076, 4473, 4873, 4934, 5071 |
| | | | | | 1210201 | |
| 29734 | 29761 | 46 | 93 | 78 | 1210206-1210208, 1211563 | 2859, 2933, 3010, 3829 |
| 29771 | 29792 | 28 | 69 | 52 | 924464, 1210211-1210212 | 2521, 3242, 3319 |
| 29814 | 29844 | 32 | 78 | 59 | 886698-886699, 924103-924104, 1210217 | 851, 925, 2408, 2485, 3628 |
| 29869 | 29903 | 52 | 84 | 70 | 1210218-1210221, 1211565 | 3706, 3782, 3860, 3936, 3983 |
| 29894 | 29919 | 39 | 87 | 66 | 1210222-1210225 | 4013, 4089, 4165, 4245 |
| 30059 | 30083 | 55 | 91 | 67 | 886706-886707, 924471, 1210232-1210234, | 1377, 1452, 2291, 2628, 2704, 2781, 4522 |
| | | | | | 1211574 | |
| 30121 | 30147 | 46 | 91 | 64 | 886708, 924472, 1210236-1210237, | 1527, 2368, 2675, 2752, 2934, 3011, 4599 |
| | | | | | 1211575-1211577 | |
| 30163 | 30198 | 30 | 95 | 62 | 886709-886711, 924105-924106, 1210238- | 326, 1602, 1677, 1870, 2562, 2906, 2983, |
| | | | | | 1210239, 1211579-1211581 | 3060, 3088, 3166 |
| 30269 | 30292 | 17 | 78 | 50 | 886714, 1211584-1211586 | 522, 3291, 3368, 3445 |
| 30319 | 30345 | 17 | 73 | 51 | 886715-886716, 924108-924109, 1210242, | 628, 702, 2024, 2101, 3398, 3754 |
| | | | | | 1211590 | |
| 30528 | 30558 | 50 | 99 | 79 | 886718, 1210246-1210247 | 852, 3707, 3783 |
| 30603 | 30626 | 59 | 70 | 64 | 886719-886720, 1210250, 1211595 | 926, 1078, 4014, 4215 |
| 30678 | 30717 | 33 | 94 | 68 | 68456, 886723, 924117, 1211596-1211597 | 1152, 1948, 4292, 4369, 4942 |
| 30726 | 30752 | 33 | 89 | 67 | 886724-886726, 924488, 1211600-1211602 | 1228, 1302, 1378, 2062, 4523, 4600, |
| | | | | | | 4754 |
| 30792 | 30813 | 47 | 90 | 64 | 886727, 924489, 1210255, 1211603-1211604 | 1453, 2139, 2676, 2753, 4401 |
| 30805 | 30839 | 32 | 64 | 51 | 886278, 924494-924496, 1210256, 1211607- | 1528, 1909, 2524, 2601, 2984, 3061, |
| | | | | | 1211608 | 4629 |
| 31065 | 31094 | 45 | 87 | 59 | 886735-886737, 924497, 1210257, 1211620 | 629, 703, 779, 1986, 3985, 4706 |
| 31172 | 31194 | 46 | 62 | 54 | 886745, 1211628 | 1303, 4755 |
| 31229 | 31259 | 38 | 78 | 61 | 886748-886750, 924508-924510, 1211629- | 1529, 1604, 1679, 2064, 2141, 2218, |
| | | | | | 1211630 | 4524, 4601 |
| 31363 | 31388 | 42 | 75 | 56 | 684562, 886755, 1211638 | 630, 3216, 5012 |
| 31450 | 31479 | 49 | 88 | 77 | 886756-886757, 1078914, 1078916 | 704, 780, 3536, 3613 |
| 31528 | 31555 | 47 | 78 | 63 | 886761-886762, 1211648-1211649 | 1755, 1830, 4217, 4294 |
| 31745 | 31768 | 28 | 91 | 60 | 886770, 1210272-1210274 | 1680, 3553, 3630, 3708 |
| 31800 | 31833 | 36 | 62 | 51 | 886773, 924515, 1211661-1211663 | 481, 2603, 3063, 3140, 3217 |
| 32262 | 32313 | 32 | 74 | 50 | 886779, 1210275, 1211669-1211672 | 929, 3679, 3756, 3784, 3833 |
| 32355 | 32385 | 32 | 87 | 51 | 886782, 1210276, 1211677-1211682 | 1831, 3862, 4295, 4372, 4449, 4526, |
| | | | | | | 4680, 4757 |
| 32452 | 32477 | 40 | 83 | 59 | 886785-886786, 924133-924135, 1211684 | 1305, 1381, 2411, 2488, 2565, 2679 |
| 32492 | 32519 | 21 | 77 | 54 | 886788, 924520, 1210278, 1211686- | 1531, 2219, 2833, 2910, 2987, 4015 |
| | | | | | 1211688 | |
| 32561 | 32591 | 63 | 75 | 69 | 886791, 1210279 | 330, 4091 |
| 32614 | 32648 | 25 | 90 | 51 | 886792, 1211690-1211691 | 407, 3141, 3218. |
| 32700 | 32739 | 22 | 74 | 51 | 885890-885891, 886794-886795, 1210285, | 556, 632, 1186, 1261, 3449, 4707 |
| | | | | | 1211694 | |
| 32735 | 32761 | 31 | 79 | 55 | 885895-885906 | 285, 362, 437, 512, 587, 662, 737, 812, |
| | | | | | | 886, 1037, 1561, 1636 |
| 33245 | 33267 | 54 | 77 | 67 | 886798-886799, 924139-924140, 1211700 | 856, 930, 2104, 2181, 3911 |
| 33281 | 33346 | 24 | 95 | 55 | 886800-886802, 924523, 1210291, | 1082, 1757, 1832, 2450, 2859, 3988, |
| | | | | | 1211701-1211710 | 4065, 4142, 4219, 4296, 4373, 4450, |
| | | | | | | 4527, 4681, 4758 |
| 33354 | 33382 | 23 | 84 | 54 | 886805-886807, 121713-121715 | 1306, 1382, 1457, 2757, 2834, 2911 |
| 33386 | 33412 | 47 | 87 | 60 | 886808-886809, 1211716-1211717 | 1532, 1607, 2988, 3065 |
| 34223 | 34247 | 37 | 81 | 56 | 924538-924541, 1210299, 1211766 | 2067, 2144, 2221, 2298, 3477, 4529 |
| 34293 | 34316 | 43 | 93 | 65 | 886842-886843, 924141, 1211771- | 1158, 1834, 2258, 2913, 2990 |
| | | | | | 1211772 | |
| 34312 | 34340 | 55 | 71 | 62 | 684566, 886844, 1211775 | 1234, 3221, 4881 |
| 34472 | 34494 | 28 | 89 | 60 | 886850, 1210300, 1211784-1211786 | 1684, 3554, 3914, 3991, 4068 |
| 34567 | 34590 | 41 | 65 | 53 | 886853, 1211789-1211791 | 485, 4299, 4376, 4453 |
| 34978 | 35012 | 17 | 87 | 57 | 684567, 886869, 1211825 | 1610, 2761, 4943 |
| 35006 | 35029 | 59 | 63 | 61 | 1210311, 1211826 | 2838, 4403 |
| 35048 | 35077 | 28 | 75 | 52 | 886870-886871, 924145-924147, | 334, 1685, 1874, 1951, 2566, 2915, 2992, |
| | | | | | 1211827-1211829 | 3069 |
| 35136 | 35162 | 42 | 42 | 51 | 886873-886875, 1210315, 1211836 | 486, 560, 636, 3608, 4556 |
| 35451 | 35486 | 47 | 67 | 56 | 886899-886890, 1211865 | 1611, 1686, 3686 |
| 35560 | 35589 | 29 | 90 | 61 | 886893, 924560, 1211867-1211871 | 487, 2223, 3840, 3917, 3994, 4071, 4148 |
| 35804 | 35843 | 33 | 77 | 53 | 718400-718405, 1210323 | 3169, 5366-5371 |
| 35897 | 35923 | 15 | 77 | 53 | 886911-886912, 1211895-1211897 | 336, 413, 3841, 3918, 3995 |
| 36453 | 36482 | 43 | 87 | 61 | 886932, 924578, 1210327-1210329, | 414, 2071, 3478, 3555, 3632, 4304, 4381, |
| | | | | | 1211929-1211931 | 4458 |
| 37036 | 37077 | 30 | 80 | 59 | 684244-684252, 885541-885549, | 269, 344, 422, 497, 572, 646, 721, 796, 1620, |
| | | | | | 1205300, 1210331 | 3786, 3847, 4834-4835, 4901, 4962, 5031, |
| | | | | | | 5099-5100, 5168-5169 |
| 37102 | 37132 | 20 | 78 | 55 | 684256-684261, 885555-885561 | 1172, 1246, 1321, 1396, 1472, 1546, 1621, |
| | | | | | | 4836, 4903, 4964, 5033, 5101, 5170 |
| 37158 | 37193 | 41 | 85 | 67 | 684262-684264, 718293, 885562-885564 | 270, 345, 423, 4837, 5102, 5171, 5258 |
| 37297 | 37373 | 31 | 89 | 61 | 684278-684294, 718313, 885576-885595 | 271, 346, 424, 499, 574, 648, 723, 798, 873, |
| | | | | | | 1024, 1098, 1174, 1247, 1322, 1397, 1473, |
| | | | | | | 1547, 1622, 1698, 1773, 4840, 4841, 4842, |
| | | | | | | 4904-4906, 4967-4968, 5035-5037, 5104- |
| | | | | | | 5106, 5174-5176, 5277 |
| 37363 | 37401 | 38 | 93 | 66 | 684295-684301, 684572, 684573, 718314, | 272, 347, 425, 500, 575, 604, 1323, 1398, |
| | | | | | 885597-885607 | 1474, 1548, 1623, 4843, 4907, 4969, 5014, |
| | | | | | | 5038, 5082, 5107-5108, 5177, 5278 |
| 37435 | 37464 | 30 | 79 | 58 | 684302-684305, 885608-885613 | 724, 799, 874, 1025, 1699, 1774, 4844, 4908, |
| | | | | | | 4970, 5178 |
| 37468 | 37493 | 45 | 79 | 65 | 596957, 684306-684307, 885614 | 1099, 5039, 5109, 5234 |
| 37495 | 37567 | 21 | 94 | 60 | 684309-684320, 684574, 885618-885628 | 273, 348, 426, 501, 576, 650, 725, 1399, 1475, |
| | | | | | | 1549, 1624, 4845, 4846, 4882, 4909-4910, 4971- |
| | | | | | | 4972, 5040-5041, 5110-5111, 5180-5181 |
| 37563 | 37626 | 22 | 88 | 60 | 684323-684337, 684575, 718315, 885633- | 274, 349, 427, 502, 577, 651, 726, 801, 876, |
| | | | | | 885653 | 1027, 1100, 1176, 1250, 1325, 1400, 1476, 1550, |
| | | | | | | 1625, 1701, 1775-1776, 4847-4849, 4911- |
| | | | | | | 4912, 4974-4975, 5042-5043, 5083, 5112-5114, |
| | | | | | | 5182-5184, 5279 |
| 37626 | 37661 | 21 | 95 | 68 | 684338-684341, 885655-88565 | 1177, 1251, 4913, 4076, 5044, 5115 |
| 37651 | 37856 | 16 | 94 | 64 | 684343-684391, 684576-684577, 885658- | 275-277, 350-352, 428-430, 503-505, 566, 578- |
| | | | | | 885715, 1078160, 1210332, and 1210345 | 579, 652-654, 727-729, 802-804, 877-879, 1028- |
| | | | | | | 1030, 1102-1104, 1165, 1178-1179, 1252-1254, |
| | | | | | | 1327-1329, 1401-1403, 1477-1479, 1551-1553, |
| | | | | | | 1626-1628, 1702-1704, 1777-1779, 3940, 4323, |
| | | | | | | 4383, 4850-4857, 4883, 4914-4920, 4944, 4977- |
| | | | | | | 4984, 5045-5052, 5116-5123, 5186-5193 |
| 37855 | 37907 | 25 | 93 | 65 | 684395-684399, 885718, 1078136, | 1629, 2632, 4017, 4460, 4537, 4858, 4922, 4986, |
| | | | | | 1078144, 1210333, 1210346 | 5124, 5194 |
| 37926 | 37976 | 38 | 94 | 63 | 684406-684409, 684411-684412, | 1105, 1180, 1705, 1780, 4093, 4860, 4988, 5054- |
| | | | | | 885729-885732, 1210334 | 5055, 5126, 5196 |
| 37971 | 37992 | 35 | 89 | 50 | 684417, 718316, 885738-885742 | 279, 354, 432, 507, 1630, 4989, 5280 |
| 38009 | 38080 | 13 | 82 | 51 | 596986, 684423-684439, 718317-718324, | 280, 355, 433, 490, 582, 657, 732, 807, 882, |
| | | | | | 885755-885766 | 1406, 1481, 1556, 1631, 4817, 4863, 4925, |
| | | | | | | 4990-4992, 5057-5059, 5129-5131, 5199-5201, |
| | | | | | | 5281-5288 |
| 38071 | 38100 | 18 | 82 | 60 | 684441-684445, 718325-718332, 885771- | 1182, 1257, 4926, 4993, 5060, 5132, 5202, |
| | | | | | 885772 | 5289-5296 |
| 38107 | 38223 | 47 | 96 | 73 | 596994, 596996, 597060, 684449-684466, | 281, 356, 415, 1482, 1557, 1632, 4864-4866, |
| | | | | | 684578, 718340-718365, and 885775-885779 | 4927, 4945, 4995-4997, 5062-5064, 5133- |
| | | | | | | 5136, 5203-5205, 5303-5304, 5306-5331 |

### Nonlimiting Disclosure and Incorporation by Reference

[0351] Each of the literature and patent publications listed herein is incorporated by reference in its entirety.

[0352] While certain compounds, compositions and methods described herein have been described with specificity in accordance with certain embodiments, the following examples serve only to illustrate the compounds described herein and are not intended to limit the same. Each of the references, GenBank accession numbers, and the like recited in the present application is incorporated herein by reference in its entirety.

[0353] Although the sequence listing accompanying this filing identifies each sequence as either “RNA” or “DNA” as required, in reality, those sequences may be modified with any combination of chemical modifications. One of skill in the art will readily appreciate that such designation as “RNA” or “DNA” to describe modified oligonucleotides is, in certain instances, arbitrary. For example, an oligonucleotide comprising a nucleoside comprising a 2′-OH sugar moiety and a thymine base could be described as a DNA having a modified sugar (2′-OH in place of one 2′-H of DNA) or as an RNA having a modified base (thymine (methylated uracil) in place of an uracil of RNA). Accordingly, nucleic acid sequences provided herein, including, but not limited to those in the sequence listing, are intended to encompass nucleic acids containing any combination of natural or modified RNA and/or DNA, including, but not limited to such nucleic acids having modified nucleobases. By way of further example and without limitation, an oligomeric compound having the nucleobase sequence “ATCGATCG” encompasses any oligomeric compounds having such nucleobase sequence, whether modified or unmodified, including, but not limited to, such compounds comprising RNA bases, such as those having sequence “AUCGAUCG” and those having some DNA bases and some RNA bases such as “AUCGATCG” and oligomeric compounds having other modified nucleobases, such as “AT^{m}CGAUCG,” wherein ^{m}C indicates a cytosine base comprising a methyl group at the 5-position.

[0354] Certain compounds described herein (e.g., modified oligonucleotides) have one or more asymmetric center and thus give rise to enantiomers, diastereomers, and other stereoisomeric configurations that may be defined, in terms of absolute stereochemistry, as (R) or (S), as α or β such as for sugar anomers, or as (D) or (L), such as for amino acids, etc. Compounds provided herein that are drawn or described as having certain stereoisomeric configurations include only the indicated compounds. Compounds provided herein that are drawn or described with undefined stereochemistry include all such possible isomers, including their stereorandom and optically pure forms, unless specified otherwise. Likewise, tautomeric forms of the compounds herein are also included unless otherwise indicated.

[0355] The compounds described herein include variations in which one or more atoms are replaced with a non-radioactive isotope or radioactive isotope of the indicated element. For example, compounds herein that comprise hydrogen atoms encompass all possible deuterium substitutions for each of the ¹H hydrogen atoms. Isotopic substitutions encompassed by the compounds herein include but are not limited to: ²H or ³H in place of ¹H, ¹³C or ¹⁴C in place of ¹²C, ¹⁵N in place of 14N, ¹⁷O or ¹⁸O in place of ¹⁶O, and ³³S, ³⁴S, ³⁵S, or ³⁶S in place of ³²S. In certain embodiments, non-radioactive isotopic substitutions may impart new properties on the oligomeric compound that are beneficial for use as a therapeutic or research tool. In certain embodiments, radioactive isotopic substitutions may make the compound suitable for research or diagnostic purposes such as imaging.

### EXAMPLES

[0356] The following examples illustrate certain embodiments of the present disclosure and are not limiting. Moreover, where specific embodiments are provided, the inventors have contemplated generic application of those specific embodiments. For example, disclosure of an oligonucleotide having a particular motif provides reasonable support for additional oligonucleotides having the same or similar motif. And, for example, where a particular high-affinity modification appears at a particular position, other high-affinity modifications at the same position are considered suitable, unless otherwise indicated.

### Example 1: Effect of 3-10-3 cEt Gapmer Modified Oligonucleotides on Human PMP22 RNA In Vitro, Single Dose

[0357] Modified oligonucleotides complementary to human PMP22 nucleic acid were tested for their effect on PMP22 RNA levels in vitro.

[0358] Modified oligonucleotides in the tables below are 3-10-3 cEt gapmers. The modified oligonucleotides are 16 nucleosides in length, wherein the central gap segment consists of ten 2′-β-D-deoxynucleosides and is flanked by wing segments at the 5′ end and the 3′ end having three nucleosides each. Each nucleoside of the 5′ wing segment and each nucleoside in the 3′ wing segment is a cEt nucleoside. All internucleoside linkages are phosphorothioate (P═S) linkages. All cytosine residues are 5-methylcytosines.

[0359] “Start site” indicates the 5′-most nucleoside to which the modified oligonucleotide is complementary in the human gene sequence. “Stop site” indicates the 3′-most nucleoside to which the modified oligonucleotide is complementary in the human gene sequence. Each modified oligonucleotide listed in the Tables below is 100% complementary to SEQ ID NO: 1 (GENBANK Accession No. NM_000304.3), SEQ ID NO: 2 (GENBANK Accession No. NC_000017.11 truncated from nucleotides 15227001 to 15268000), SEQ ID NO: 4 (GENBANK Accession No. NM_001281455.1), SEQ ID NO: 5 (GENBANK Accession No. NM_001281456.1), and/or SEQ ID NO: 8 (GENBANK Accession No. AK300690.1). ‘N/A’ indicates that the modified oligonucleotide is not 100% complementary to that particular gene sequence.

[0360] Cultured K-562 cells at a density of 50,000 cells per well were treated with 10,000 nM of modified oligonucleotide by electroporation. After a treatment period of approximately 24 hours, total RNA was isolated from the cells and PMP22 RNA levels were measured by quantitative real-time RTPCR. Human PMP22 primer probe set RTS4579 (forward sequence CTTGCTGGTCTGTGCGTGAT, designated herein as SEQ ID NO: 15; reverse sequence ACCGTAGGAGTAATCCGAGTTGAG, designated herein as SEQ ID NO: 16; probe sequence CATCTACACGGTGAGGCACCCGG, designated herein as SEQ ID NO: 17) was used to measure RNA levels. PMP22 RNA levels were adjusted according to total RNA content, as measured by RIBOGREEN®. Results are presented in the tables below as percent PMP22 RNA levels relative to untreated control cells. The values marked with an asterisk (*) indicate that the modified oligonucleotide is complementary to the amplicon region of the primer probe set. Additional assays may be used to measure the potency and efficacy of the modified oligonucleotides complementary to the amplicon region.

TABLE 1
Percent control of human PMP22 RNA with 3-10-3 cEt gapmers

| | SEQ | SEQ | SEQ | SEQ | | | |
|---|---|---|---|---|---|---|---|
| | ID | ID | ID | ID | | | |
| | NO: 1 | NO: 1 | NO: 2 | NO: 2 | | PMP22 | SEQ |
| Compound | Start | Stop | Start | Stop | | (% | ID |
| Number | Site | Site | Site | Site | Sequence (5′ to 3′) | UTC) | NO |
| 596986 | 1687 | 1702 | 38050 | 38065 | GTCCTTGGAGGCACAG | 63 | 4817 |
| 684110 | 20 | 35 | 2663 | 2678 | AACTGAAGCCAGACCA | 98 | 185 |
| 684116 | 37 | 52 | 2680 | 2695 | CTGGTGGTGCTCCCTG | 116 | 187 |
| 684122 | 62 | 77 | 2705 | 2720 | CCAACCAGGCTCCCCG | 74 | 188 |
| 684128 | 87 | 102 | 2730 | 2745 | AGCCGACAGACTAAGC | 81 | 266 |
| 684135 | 128 | 143 | 2771 | 2786 | GTTAAGGCAAGACCCT | 118 | 944 |
| 684142 | 156 | 171 | 2799 | 2814 | GATTTCTTTGCAGCCA | 115 | 4818 |
| 684148 | 196 | 211 | N/A | N/A | TTTCTGCCCGGCCAAA | 97 | 948 |
| 684154 | 225 | 240 | 7260 | 7275 | ATTCTGGCGGCAAGTT | 52 | 4819 |
| 684160 | 247 | 31 | 7282 | 7297 | GATACTCAGCAACAGG | 15 | 4820 |
| 684166 | 284 | 299 | 7319 | 7334 | CGAACAGCAGCACCAG | 46 | 4821 |
| 684172 | 313 | 328 | N/A | N/A | CACGATCCATTGGCTG | 88 | 4822 |
| 684178 | 345 | 360 | 8836 | 8851 | TTCTGCCAGAGATCAG | 37 | 4823 |
| 684184 | 379 | 394 | 8870 | 8885 | GTGGTGGACATTTCCT | 54 | 4824 |
| 684190 | 415 | 430 | N/A | N/A | AGACTGCAGCCATTCG | 42 | 4825 |
| 684196 | 437 | 452 | 28410 | 28425 | ACAGGATCATGGTGGC | 45 | 4826 |
| 684202 | 461 | 476 | 28434 | 28449 | GAGACAGAATGCTGAA | 20 | 4827 |
| 684208 | 511 | 526 | 28484 | 28499 | AAACCTGCCCCCCTTG | 38 | 4828 |
| 684214 | 528 | 543 | 28501 | 28516 | AAGATTCCAGTGATGT | 83 | 4829 |
| 684220 | 554 | 569 | N/A | N/A | TCACGCACAGACCAGC | 14* | 4830 |
| 684228 | 580 | 595 | 36943 | 36958 | CACCGTGTAGATGGCC | 12* | 4831 |
| 684234 | 605 | 620 | 36968 | 36983 | AGTTGAGATGCCACTC | 64* | 4832 |
| 684240 | 627 | 642 | 36990 | 37005 | GCGAAACCGTAGGAGT | 29* | 4833 |
| 684246 | 678 | 693 | 37041 | 37056 | ATGACACCGCTGAGAA | 44 | 4834 |
| 684252 | 698 | 713 | 37061 | 37076 | GTTTCCGCAAGATCAC | 27 | 4835 |
| 684258 | 744 | 759 | 37107 | 37122 | ATGTACGCTCAGAGCC | 50 | 4836 |
| 684264 | 815 | 830 | 37178 | 37193 | GTTTGAGTTTGGGATT | 15 | 4837 |
| 684269 | 870 | 885 | 37233 | 37248 | ATATACATCTTCAATC | 65 | 4838 |
| 684275 | 895 | 910 | 37258 | 37273 | ATAGGTTTTATAAACC | 75 | 4839 |
| 684281 | 954 | 969 | 37317 | 37332 | CTGATGGTCAACATAA | 19 | 4840 |
| 684287 | 969 | 984 | 37332 | 37347 | AGGCTCAACACGAGGC | 35 | 4841 |
| 684293 | 990 | 1005 | 37353 | 37368 | AGTTCCTTAGCTACTT | 38 | 4842 |
| 684298 | 1010 | 1025 | 37373 | 37388 | ATTATACTGTTAGGAT | 28 | 4843 |
| 684303 | 1077 | 1092 | 37440 | 37455 | GGAGTTATCTTATTTC | 25 | 4844 |
| 684309 | 1132 | 1147 | 37495 | 37510 | TGAGGTGGACTGGGAG | 43 | 4845 |
| 684320 | 1189 | 1204 | 37552 | 37567 | CACCAGAAAAGGGCTT | 59 | 4846 |
| 684326 | 1210 | 1225 | 37573 | 37588 | TGTTGGATGCACTGGG | 21 | 4847 |
| 684332 | 1235 | 1250 | 37598 | 37613 | CAGAGGTTCGGGCAGC | 25 | 4848 |
| 684337 | 1248 | 1263 | 37611 | 37626 | GTAAAGCTTCACACAG | 78 | 4849 |
| 684343 | 1293 | 1308 | 37656 | 37671 | GTGTTTTTGCAAGGGC | 14 | 4850 |
| 684349 | 1310 | 1325 | 37673 | 37688 | TGCCAATGCCACAAGC | 52 | 4851 |
| 684355 | 1325 | 1340 | 37688 | 37703 | CTGTAAGGGCAAGTAT | 63 | 4852 |
| 684361 | 1343 | 1358 | 37706 | 37721 | GTGACGAAGATACTCC | 17 | 4853 |
| 684367 | 1376 | 1391 | 37739 | 37754 | AGACTTGTTGTCACTG | 9 | 4854 |
| 684379 | 1428 | 1443 | 37791 | 37806 | GTTTAGATGATTAGTG | 23 | 4855 |
| 684386 | 1451 | 1466 | 37814 | 37829 | GTTAATTGGATTTCCA | 16 | 4856 |
| 684391 | 1478 | 1493 | 37841 | 37856 | CTCCATTCTATCTTAT | 25 | 4857 |
| 684397 | 1521 | 1536 | 37884 | 37899 | AAAGCAGTTATAAACC | 33 | 4858 |
| 684403 | 1544 | 1559 | 37907 | 37922 | TAATAGCAGCCTAGCT | 66 | 4859 |
| 684409 | 1577 | 1592 | 37940 | 37955 | GATGAAGGCTTTATGA | 39 | 4860 |
| 684415 | 1604 | 1619 | 37967 | 37982 | CTCCGACCGTAAGAAA | 77 | 4861 |
| 684421 | 1636 | 1651 | 37999 | 38014 | GGTCCCAAGGAGTCTA | 64 | 4862 |
| 684428 | 1665 | 1680 | 38028 | 38043 | CTAGACCCAGCCAAGC | 57 | 4863 |
| 684440 | 1705 | 1720 | 38068 | 38083 | ACAAGTCATTGCCAGA | 8 | 32 |
| 684446 | 1725 | 1740 | 38088 | 38103 | ATCTACAGTTGGTGGC | 35 | 33 |
| 684451 | 1753 | 1768 | 38116 | 38131 | CTTAGCATCAGAAGGG | 44 | 4864 |
| 684457 | 1801 | 1816 | 38164 | 38179 | GTTGGTATAAAATCAG | 14 | 4865 |
| 684463 | 1822 | 1837 | 38185 | 38200 | TAATGCATCTTAGTCC | 29 | 4866 |
| 684468 | N/A | N/A | 5413 | 5428 | CCCCTTTAACGGGAAC | 108 | 4867 |
| 684474 | N/A | N/A | 5479 | 5494 | CGCCAAAGCTGCGCTG | 93 | 4868 |
| 684480 | N/A | N/A | 5520 | 5535 | CTCAAACACAAACTCG | 70 | 4869 |
| 684486 | N/A | N/A | 5549 | 5564 | GGAACAGCTGTCCCGA | 100 | 4870 |
| 684504 | N/A | N/A | 7191 | 7206 | CACTGGGCCGAGCGAC | 80 | 4871 |
| 684511 | N/A | N/A | 24289 | 24304 | ATAGAACATATCATAG | 75 | 4872 |
| | | | 24331 | 24346 | | | |
| 684516 | N/A | N/A | 29348 | 29363 | TGTAAGATGCTAGGCA | 33 | 4873 |
| | | | 29293 | 29308 | | | |
| 684524 | N/A | N/A | 5221 | 5236 | ACCAGAGGCGGCTGAG | 122 | 4874 |
| 684530 | N/A | N/A | 9328 | 9343 | CAGTGAGCTAGCCCCA | 40 | 4875 |
| 684536 | N/A | N/A | 13319 | 13334 | TAATAAGATGGCCAGG | 96 | 4876 |
| 684542 | N/A | N/A | 17241 | 17256 | ACCTCCTAGAGTTCTT | 63 | 4877 |
| 684547 | N/A | N/A | 21206 | 21221 | CTAAAGCTCTGGCCGG | 71 | 4878 |
| 684557 | N/A | N/A | 28057 | 28072 | CATACAAATATGTACG | 33 | 4879 |
| 684560 | N/A | N/A | 30038 | 30053 | ATGCAATGGATATGAT | 79 | 4880 |
| 684566 | N/A | N/A | 34325 | 34340 | GTTCTAGCTGCTGCTC | 29 | 4881 |
| 684574 | 1153 | 1168 | 37516 | 37531 | CCCACACTTTGGTTTT | 39 | 4882 |
| 684576 | 1401 | 1416 | 37764 | 37779 | TGGTAAATCCATAGCA | 28 | 4883 |

TABLE 2
Percent control of human PMP22 RNA with 3-10-3 cEt gapmers

| | SEQ | SEQ | SEQ | SEQ | | | |
|---|---|---|---|---|---|---|---|
| | ID | ID | ID | ID | | | |
| | NO: 1 | NO: 1 | NO: 2 | NO: 2 | | PMP22 | SEQ |
| Compound | Start | Stop | Start | Stop | | (% | ID |
| Number | Site | Site | Site | Site | Sequence (5′ to 3′) | UTC) | NO |
| 597057 | 1729 | 1744 | 38092 | 38107 | ATACATCTACAGTTGG | 20 | 4884 |
| 684111 | 21 | 36 | 2664 | 2679 | TAACTGAAGCCAGACC | 93 | 263 |
| 684117 | 42 | 57 | 2685 | 2700 | GTTCCCTGGTGGTGCT | 120 | 4885 |
| 684123 | 64 | 79 | 2707 | 2722 | TTCCAACCAGGCTCCC | 105 | 943 |
| 684129 | 93 | 108 | 2736 | 2751 | ACCCGCAGCCGACAGA | 92 | 111 |
| 684137 | 133 | 148 | 2776 | 2791 | GGGATGTTAAGGCAAG | 98 | 114 |
| 684143 | 162 | 177 | 2805 | 2820 | CAAGCAGATTTCTTTG | 111 | 946 |
| 684149 | 201 | 216 | N/A | N/A | CGGAGTTTCTGCCCGG | 84 | 117 |
| 684155 | 229 | 244 | 7264 | 7279 | GAGCATTCTGGCGGCA | 26 | 4886 |
| 684161 | 250 | 265 | 7285 | 7300 | GATGATACTCAGCAAC | 35 | 4887 |
| 684167 | 287 | 302 | 7322 | 7337 | AGACGAACAGCAGCAC | 75 | 4888 |
| 684173 | 316 | 331 | N/A | N/A | GCCCACGATCCATTGG | 91 | 4889 |
| 684179 | 350 | 365 | 8841 | 8856 | TACAGTTCTGCCAGAG | 27 | 4890 |
| 684185 | 382 | 397 | 8873 | 8888 | ACAGTGGTGGACATTT | 26 | 4891 |
| 684191 | 417 | 432 | 28390 | 28405 | ACAGACTGCAGCCATT | 44 | 4892 |
| 684197 | 441 | 456 | 28414 | 28429 | ATCGACAGGATCATGG | 35 | 4893 |
| 684203 | 481 | 496 | 28454 | 28469 | TTGGCAGAAGAACAGG | 48 | 4894 |
| 684209 | 514 | 529 | 28487 | 28502 | GTAAAACCTGCCCCCC | 45 | 4895 |
| 684215 | 532 | 547 | 28505 | 28520 | TTGGAAGATTCCAGTG | 76 | 4896 |
| 684221* | 556 | 571 | N/A | N/A | CATCACGCACAGACCA | 24 | 4897 |
| 684229* | 584 | 599 | 36947 | 36962 | GCCTCACCGTGTAGAT | 9 | 4898 |
| 684235* | 609 | 624 | 36972 | 36987 | TCCGAGTTGAGATGCC | 17 | 4899 |
| 684241* | 629 | 644 | 36992 | 37007 | AGGCGAAACCGTAGGA | 37 | 4900 |
| 684247 | 679 | 694 | 37042 | 37057 | GATGACACCGCTGAGA | 28 | 4901 |
| 684253 | 723 | 738 | 37086 | 37101 | CAGACCGTCTGGGCGC | 56 | 4902 |
| 684259 | 748 | 763 | 37111 | 37126 | CCCTATGTACGCTCAG | 26 | 4903 |
| 684282 | 955 | 970 | 37318 | 37333 | GCTGATGGTCAACATA | 27 | 4904 |
| 684288 | 974 | 989 | 37337 | 37352 | CTTTAAGGCTCAACAC | 49 | 4905 |
| 684294 | 995 | 1010 | 37358 | 37373 | TGTAAAGTTCCTTAGC | 41 | 4906 |
| 684299 | 1015 | 1030 | 37378 | 37393 | GCTGGATTATACTGTT | 17 | 4907 |
| 684304 | 1079 | 1094 | 37442 | 37457 | ATGGAGTTATCTTATT | 41 | 4908 |
| 684310 | 1134 | 1149 | 37497 | 37512 | AATGAGGTGGACTGGG | 25 | 4909 |
| 684315 | 1157 | 1172 | 37520 | 37535 | TCTACCCACACTTTGG | 22 | 4910 |
| 684327 | 1214 | 1229 | 37577 | 37592 | TTTCTGTTGGATGCAC | 42 | 4911 |
| 684333 | 1236 | 1251 | 37599 | 37614 | ACAGAGGTTCGGGCAG | 40 | 4912 |
| 684338 | 1263 | 1278 | 37626 | 37641 | TTTGTCCGTGTGCGCG | 16 | 4913 |
| 684344 | 1298 | 1313 | 37661 | 37676 | AAGCCGTGTTTTTGCA | 40 | 4914 |
| 684350 | 1313 | 1328 | 37676 | 37691 | GTATGCCAATGCCACA | 36 | 4915 |
| 684356 | 1328 | 1343 | 37691 | 37706 | CACCTGTAAGGGCAAG | 15 | 4916 |
| 684362 | 1349 | 1364 | 37712 | 37727 | AGATGTGTGACGAAGA | 10 | 4917 |
| 684368 | 1381 | 1396 | 37744 | 37759 | TTCAAAGACTTGTTGT | 41 | 4918 |
| 684373 | 1403 | 1418 | 37766 | 37781 | AATGGTAAATCCATAG | 59 | 4919 |
| 684380 | 1432 | 1447 | 37795 | 37810 | AGTTGTTTAGATGATT | 11 | 4920 |
| 684392 | 1481 | 1496 | 37844 | 37859 | GGTCTCCATTCTATCT | 38 | 4921 |
| 684398 | 1526 | 1541 | 37889 | 37904 | GTACAAAAGCAGTTAT | 63 | 4922 |
| 684404 | 1547 | 1562 | 37910 | 37925 | TAATAATAGCAGCCTA | 47 | 4923 |
| 684416 | 1607 | 1622 | 37970 | 37985 | ATGCTCCGACCGTAAG | 68 | 4924 |
| 684429 | 1668 | 1683 | 38031 | 38046 | AGCCTAGACCCAGCCA | 52 | 4925 |
| 684441 | 1708 | 1723 | 38071 | 38086 | AATACAAGTCATTGCC | 27 | 4926 |
| 684452 | 1755 | 1770 | 38118 | 38133 | GTCTTAGCATCAGAAG | 32 | 4927 |
| 684469 | N/A | N/A | 5417 | 5432 | CGTTCCCCTTTAACGG | 114 | 4928 |
| 684475 | N/A | N/A | 5480 | 5495 | CCGCCAAAGCTGCGCT | 94 | 4929 |
| 684481 | N/A | N/A | 5525 | 5540 | GTGGCCTCAAACACAA | 79 | 4930 |
| 684487 | N/A | N/A | 5552 | 5567 | AAAGGAACAGCTGTCC | 90 | 4931 |
| 684499 | N/A | N/A | 7157 | 7172 | AGGGTCCCGCGCACTA | 82 | 4932 |
| 684505 | N/A | N/A | 7194 | 7209 | ACGCACTGGGCCGAGC | 70 | 4933 |
| 684517 | N/A | N/A | 29349 | 29364 | ATGTAAGATGCTAGGC | 22 | 4934 |
| | | | 29294 | 29309 | | | |
| 684525 | N/A | N/A | 5880 | 5895 | CCACAGGGACTGTTTT | 90 | 4935 |
| 684531 | N/A | N/A | 9978 | 9993 | GATTATGCAAAGCCAG | 19 | 4936 |
| 684537 | N/A | N/A | 13970 | 13985 | ATGGAGAGACTCCCGA | 72 | 4937 |
| 684543 | N/A | N/A | 18077 | 18092 | GTTTAACAAGGTAATT | 73 | 4938 |
| 684548 | N/A | N/A | 21859 | 21874 | CAATTCATATCTCCTC | 31 | 4939 |
| 684552 | N/A | N/A | 24492 | 24507 | CCAAAACGAACAAATG | 88 | 4940 |
| 684558 | N/A | N/A | 28709 | 28724 | TAAGTCCCAAGTTCTA | 70 | 4941 |
| 684561 | N/A | N/A | 30688 | 30703 | GCCTAAAATGATGTAA | 67 | 4942 |
| 684567 | N/A | N/A | 34978 | 34993 | GATGTTTTAGGGAATA | 34 | 4943 |
| 684577 | 1453 | 1468 | 37816 | 37831 | TTGTTAATTGGATTTC | 21 | 4944 |
| 684578 | 1823 | 1838 | 38186 | 38201 | TTAATGCATCTTAGTC | 28 | 4945 |

TABLE 3
Percent control of human PMP22 RNA with 3-10-3 cEt gapmers

| | SEQ | SEQ | SEQ | SEQ | | | |
|---|---|---|---|---|---|---|---|
| | ID | ID | ID | ID | | | |
| | NO: 1 | NO: 1 | NO: 2 | NO: 2 | | PMP22 | SEQ |
| Compound | Start | Stop | Start | Stop | | (% | ID |
| Number | Site | Site | Site | Site | Sequence (5′ to 3′) | UTC) | NO |
| 684112 | 23 | 38 | 2666 | 2681 | TGTAACTGAAGCCAGA | 62 | 108 |
| 684118 | 47 | 62 | 2690 | 2705 | GAGATGTTCCCTGGTG | 121 | 264 |
| 684124 | 67 | 82 | 2710 | 2725 | AGCTTCCAACCAGGCT | 92 | 189 |
| 684131 | 98 | 113 | 2741 | 2756 | CAGAGACCCGCAGCCG | 120 | 192 |
| 684138 | 138 | 153 | 2781 | 2796 | TGCAAGGGATGTTAAG | 81 | 193 |
| 684144 | 166 | 181 | 2809 | 2824 | CTTCCAAGCAGATTTC | 102 | 116 |
| 684150 | 206 | 221 | 7241 | 7256 | CTCAGCGGAGTTTCTG | 53 | 4946 |
| 684156 | 231 | 246 | 7266 | 7281 | AGGAGCATTCTGGCGG | 46 | 4947 |
| 684162 | 253 | 268 | 7288 | 7303 | GACGATGATACTCAGC | 17 | 4948 |
| 684168 | 289 | 304 | 7324 | 7339 | GGAGACGAACAGCAGC | 45 | 4949 |
| 684174 | 321 | 336 | 8812 | 8827 | CCATTGCCCACGATCC | 23 | 4950 |
| 684180 | 351 | 366 | 8842 | 8857 | CTACAGTTCTGCCAGA | 42 | 4951 |
| 684186 | 386 | 401 | 8877 | 8892 | AGAAACAGTGGTGGAC | 37 | 4952 |
| 684192 | 420 | 435 | 28393 | 28408 | TGGACAGACTGCAGCC | 56 | 4953 |
| 684198 | 445 | 460 | 28418 | 28433 | GATGATCGACAGGATC | 70 | 4954 |
| 684204 | 491 | 506 | 28464 | 28479 | GGGTGAAGAGTTGGCA | 87 | 4955 |
| 684210 | 517 | 532 | 28490 | 28505 | GATGTAAAACCTGCCC | 40 | 4956 |
| 684216 | 534 | 549 | 28507 | 28522 | ATTTGGAAGATTCCAG | 92 | 4957 |
| 684222* | 559 | 574 | 36922 | 36937 | ACTCATCACGCACAGA | 7 | 4958 |
| 684230* | 589 | 604 | 36952 | 36967 | CGGGTGCCTCACCGTG | 14 | 4959 |
| 684236* | 610 | 625 | 36973 | 36988 | ATCCGAGTTGAGATGC | 37 | 4960 |
| 684242* | 633 | 648 | 36996 | 37011 | ATGTAGGCGAAACCGT | 50 | 4961 |
| 684248 | 683 | 698 | 37046 | 37061 | CATAGATGACACCGCT | 35 | 4962 |
| 684254 | 726 | 741 | 37089 | 37104 | AGACAGACCGTCTGGG | 90 | 4963 |
| 684260 | 749 | 764 | 37112 | 37127 | TCCCTATGTACGCTCA | 22 | 4964 |
| 684266 | 863 | 878 | 37226 | 37241 | TCTTCAATCAACAGCA | 19 | 4965 |
| 684271 | 883 | 898 | 37246 | 37261 | AACCGGAGATATTATA | 66 | 4966 |
| 684277 | 905 | 920 | 37268 | 37283 | AGTGTTATAAATAGGT | 9 | 40 |
| 684283 | 959 | 974 | 37322 | 37337 | CGAGGCTGATGGTCAA | 21 | 4967 |
| 684289 | 979 | 994 | 37342 | 37357 | TACTTCTTTAAGGCTC | 11 | 4968 |
| 684295 | 1000 | 1015 | 37363 | 37378 | TAGGATGTAAAGTTCC | 32 | 4969 |
| 684305 | 1082 | 1097 | 37445 | 37460 | GAGATGGAGTTATCTT | 70 | 4970 |
| 684311 | 1137 | 1152 | 37500 | 37515 | CTAAATGAGGTGGACT | 49 | 4971 |
| 684316 | 1158 | 1173 | 37521 | 37536 | TTCTACCCACACTTTG | 49 | 4972 |
| 684322 | 1195 | 1210 | 37558 | 37573 | GTCACCCACCAGAAAA | 90 | 4973 |
| 684328 | 1215 | 1230 | 37578 | 37593 | GTTTCTGTTGGATGCA | 27 | 4974 |
| 684334 | 1239 | 1254 | 37602 | 37617 | CACACAGAGGTTCGGG | 31 | 4975 |
| 684339 | 1275 | 1290 | 37638 | 37653 | CAGTTTGGGCATTTTG | 5 | 4976 |
| 684345 | 1301 | 1316 | 37664 | 37679 | CACAAGCCGTGTTTTT | 59 | 4977 |
| 684351 | 1315 | 1330 | 37678 | 37693 | AAGTATGCCAATGCCA | 26 | 4978 |
| 684357 | 1332 | 1347 | 37695 | 37710 | ACTCCACCTGTAAGGG | 41 | 4979 |
| 684363 | 1352 | 1367 | 37715 | 37730 | TTTAGATGTGTGACGA | 12 | 4980 |
| 684369 | 1388 | 1403 | 37751 | 37766 | GCACCATTTCAAAGAC | 36 | 4981 |
| 684374 | 1407 | 1422 | 37770 | 37785 | AAGGAATGGTAAATCC | 29 | 4982 |
| 684381 | 1434 | 1449 | 37797 | 37812 | TGAGTTGTTTAGATGA | 17 | 4983 |
| 684387 | 1459 | 1474 | 37822 | 37837 | GTAAAATTGTTAATTG | 84 | 4984 |
| 684393 | 1487 | 1502 | 37850 | 37865 | TATTCAGGTCTCCATT | 21 | 4985 |
| 684399 | 1529 | 1544 | 37892 | 37907 | TAGGTACAAAAGCAGT | 26 | 4986 |
| 684405 | 1559 | 1574 | 37922 | 37937 | TACTCATTATAGTAAT | 80 | 4987 |
| 684411 | 1585 | 1600 | 37948 | 37963 | GTGGGAGTGATGAAGG | 25 | 4988 |
| 684417 | 1612 | 1627 | 37975 | 37990 | TTCTGATGCTCCGACC | 54 | 4989 |
| 684423 | 1646 | 1661 | 38009 | 38024 | AGGAACTCACGGTCCC | 63 | 4990 |
| 684430 | 1669 | 1684 | 38032 | 38047 | CAGCCTAGACCCAGCC | 45 | 4991 |
| 684436 | 1692 | 1707 | 38055 | 38070 | AGACAGTCCTTGGAGG | 59 | 4992 |
| 684442 | 1711 | 1726 | 38074 | 38089 | GCCAATACAAGTCATT | 40 | 4993 |
| 684447 | 1738 | 1753 | 38101 | 38116 | GCACCATATATACATC | 57 | 4994 |
| 684453 | 1758 | 1773 | 38121 | 38136 | GGAGTCTTAGCATCAG | 9 | 4995 |
| 684459 | 1810 | 1825 | 38173 | 38188 | GTCCACACAGTTGGTA | 47 | 4996 |
| 684464 | 1824 | 1839 | 38187 | 38202 | TTTAATGCATCTTAGT | 30 | 4997 |
| 684470 | N/A | N/A | 5431 | 5446 | TGGGAGGCTCCTGGCG | 81 | 4998 |
| 684476 | N/A | N/A | 5495 | 5510 | GCTCCGCTGCTGGCGC | 87 | 4999 |
| 684482 | N/A | N/A | 5534 | 5549 | ATCCTCAGGGTGGCCT | 85 | 5000 |
| 684488 | N/A | N/A | 5556 | 5571 | GCCCAAAGGAACAGCT | 94 | 5001 |
| 684500 | N/A | N/A | 7171 | 7186 | GCGCGCGCAGAGGGAG | 63 | 5002 |
| 684506 | N/A | N/A | 7201 | 7216 | AGGCCGAACGCACTGG | 75 | 5003 |
| 684512 | N/A | N/A | 29289 | 29304 | AGATGCTAGGCAGAAT | 28 | 5004 |
| | | | 29344 | 29359 | | | |
| 684518 | N/A | N/A | 29311 | 29326 | AGATGTAAGATGTAAG | 55 | 5005 |
| | | | 29318 | 29333 | | | |
| | | | 29325 | 29340 | | | |
| 684526 | N/A | N/A | 6544 | 6559 | AAGAATGGCTCGAGAG | 108 | 5006 |
| 684532 | N/A | N/A | 10657 | 10672 | AACTTAGCAACTCCTC | 41 | 5007 |
| 684538 | N/A | N/A | 14622 | 14637 | GGTAAGGCAGCAAAAG | 75 | 5008 |
| 684544 | N/A | N/A | 18727 | 18742 | GAACAGAGGCTCCGGG | 79 | 5009 |
| 684549 | N/A | N/A | 22519 | 22534 | TAACTTGCCACATACA | 59 | 5010 |
| 684553 | N/A | N/A | 25142 | 25157 | GCTCAACATATACCTA | 33 | 5011 |
| 684562 | N/A | N/A | 31363 | 31378 | CACTTGCCAGGTTTTC | 25 | 5012 |
| 684568 | N/A | N/A | 35631 | 35646 | GACCTGCCACCTACAG | 75 | 5013 |
| 684573 | 1018 | 1033 | 37381 | 37396 | TGAGCTGGATTATACT | 47 | 5014 |

TABLE 4
Percent control of human PMP22 RNA with 3-10-3 cEt gapmers

| | SEQ | SEQ | SEQ | SEQ | | | |
|---|---|---|---|---|---|---|---|
| | ID | ID | ID | ID | | | |
| | NO: 1 | NO: 1 | NO: 2 | NO: 2 | | PMP22 | SEQ |
| Compound | Start | Stop | Start | Stop | | (% | ID |
| Number | Site | Site | Site | Site | Sequence (5′ to 3′) | UTC) | NO |
| 684113 | 26 | 41 | 2669 | 2684 | CCCTGTAACTGAAGCC | 125 | 940 |
| 684119 | 52 | 67 | 2695 | 2710 | TCCCCGAGATGTTCCC | 98 | 941 |
| 684125 | 73 | 88 | 2716 | 2731 | GCCTGCAGCTTCCAAC | 105 | 265 |
| 684132 | 101 | 116 | 2744 | 2759 | AGTCAGAGACCCGCAG | 170 | 113 |
| 684139 | 141 | 156 | 2784 | 2799 | AAATGCAAGGGATGTT | 52 | 115 |
| | | | 16186 | 16201 | | | |
| 684145 | 169 | 184 | 2812 | 2827 | CTTCTTCCAAGCAGAT | 117 | 194 |
| 684151 | 211 | 226 | 7246 | 7261 | TTCTGCTCAGCGGAGT | 27 | 5015 |
| 684157 | 235 | 250 | 7270 | 7285 | CAGGAGGAGCATTCTG | 67 | 5016 |
| 684163 | 255 | 270 | 7290 | 7305 | AGGACGATGATACTCA | 20 | 5017 |
| 684169 | 306 | 321 | N/A | N/A | CATTGGCTGACGATCG | 77 | 5018 |
| 684175 | 323 | 338 | 8814 | 8829 | GTCCATTGCCCACGAT | 41 | 5019 |
| 684181 | 355 | 370 | 8846 | 8861 | GGTGCTACAGTTCTGC | 21 | 5020 |
| 684187 | 390 | 405 | 8881 | 8896 | GATGAGAAACAGTGGT | 29 | 5021 |
| 684193 | 425 | 440 | 28398 | 28413 | TGGCCTGGACAGACTG | 75 | 5022 |
| 684199 | 448 | 463 | 28421 | 28436 | GAAGATGATCGACAGG | 27 | 5023 |
| 684205 | 499 | 514 | 28472 | 28487 | CTTGGTGAGGGTGAAG | 107 | 5024 |
| 684211 | 519 | 534 | 28492 | 28507 | GTGATGTAAAACCTGC | 19 | 5025 |
| 684217 | 543 | 558 | 28516 | 28531 | CCAGCAAGAATTTGGA | 166* | 5026 |
| 684224 | 564 | 579 | 36927 | 36942 | GCAGCACTCATCACGC | 11* | 5027 |
| 684231 | 594 | 609 | 36957 | 36972 | CACTCCGGGTGCCTCA | 6* | 5028 |
| 684237 | 614 | 629 | 36977 | 36992 | AGTAATCCGAGTTGAG | 9* | 5029 |
| 684243 | 639 | 654 | 37002 | 37017 | GCCAGGATGTAGGCGA | 78 | 5030 |
| 684249 | 686 | 701 | 37049 | 37064 | TCACATAGATGACACC | 28 | 5031 |
| 684255 | 730 | 745 | 37093 | 37108 | CCTCAGACAGACCGTC | 69 | 5032 |
| 684261 | 754 | 769 | 37117 | 37132 | TCCCTTCCCTATGTAC | 65 | 5033 |
| 684267 | 864 | 879 | 37227 | 37242 | ATCTTCAATCAACAGC | 11 | 30 |
| 684272 | 886 | 901 | 37249 | 37264 | ATAAACCGGAGATATT | 73 | 5034 |
| 684278 | 934 | 949 | 37297 | 37312 | CAAACAATACTATGTA | 67 | 5035 |
| 684284 | 961 | 976 | 37324 | 37339 | CACGAGGCTGATGGTC | 17 | 5036 |
| 684290 | 982 | 997 | 37345 | 37360 | AGCTACTTCTTTAAGG | 45 | 5037 |
| 684300 | 1020 | 1035 | 37383 | 37398 | ACTGAGCTGGATTATA | 41 | 5038 |
| 684306 | 1113 | 1128 | 37476 | 37491 | GGTATCTTCTTTCAGA | 42 | 5039 |
| 684312 | 1140 | 1155 | 37503 | 37518 | TTTCTAAATGAGGTGG | 11 | 5040 |
| 684317 | 1162 | 1177 | 37525 | 37540 | GGGTTTCTACCCACAC | 79 | 5041 |
| 684323 | 1200 | 1215 | 37563 | 37578 | ACTGGGTCACCCACCA | 58 | 5042 |
| 684329 | 1220 | 1235 | 37583 | 37598 | CGGCTGTTTCTGTTGG | 16 | 5043 |
| 684340 | 1278 | 1293 | 37641 | 37656 | CTCCAGTTTGGGCATT | 26 | 5044 |
| 684346 | 1303 | 1318 | 37666 | 37681 | GCCACAAGCCGTGTTT | 48 | 5045 |
| 684352 | 1318 | 1333 | 37681 | 37696 | GGCAAGTATGCCAATG | 72 | 5046 |
| 684358 | 1333 | 1348 | 37696 | 37711 | TACTCCACCTGTAAGG | 39 | 5047 |
| 684364 | 1357 | 1372 | 37720 | 37735 | TCTCATTTAGATGTGT | 18 | 5048 |
| 684370 | 1393 | 1408 | 37756 | 37771 | CCATAGCACCATTTCA | 25 | 5049 |
| 684375 | 1413 | 1428 | 37776 | 37791 | GATAATAAGGAATGGT | 23 | 5050 |
| 684382 | 1437 | 1452 | 37800 | 37815 | CAGTGAGTTGTTTAGA | 11 | 5051 |
| 684388 | 1471 | 1486 | 37834 | 37849 | CTATCTTATGTTGTAA | 31 | 5052 |
| 684394 | 1489 | 1504 | 37852 | 37867 | ATTATTCAGGTCTCCA | 8 | 31 |
| 684400 | 1532 | 1547 | 37895 | 37910 | AGCTAGGTACAAAAGC | 69 | 5053 |
| 684406 | 1563 | 1578 | 37926 | 37941 | GATTTACTCATTATAG | 20 | 5054 |
| 684412 | 1597 | 1612 | 37960 | 37975 | CGTAAGAAAAATGTGG | 50 | 5055 |
| 684418 | 1617 | 1632 | 37980 | 37995 | GCTTGTTCTGATGCTC | 61 | 5056 |
| 684424 | 1650 | 1665 | 38013 | 38028 | CTCTAGGAACTCACGG | 49 | 5057 |
| 684431 | 1671 | 1686 | 38034 | 38049 | AACAGCCTAGACCCAG | 47 | 5058 |
| 684437 | 1694 | 1709 | 38057 | 38072 | CCAGACAGTCCTTGGA | 78 | 5059 |
| 684443 | 1714 | 1729 | 38077 | 38092 | GTGGCCAATACAAGTC | 55 | 5060 |
| 684448 | 1743 | 1758 | 38106 | 38121 | GAAGGGCACCATATAT | 58 | 5061 |
| 684454 | 1763 | 1778 | 38126 | 38141 | GGTCTGGAGTCTTAGC | 28 | 5062 |
| 684460 | 1812 | 1827 | 38175 | 38190 | TAGTCCACACAGTTGG | 23 | 5063 |
| 684465 | 1841 | 1856 | 38204 | 38219 | GTTACTCTGATGTTTA | 29 | 5064 |
| 684471 | N/A | N/A | 5452 | 5467 | GCGCGCGAAGCAAGGG | 101 | 5065 |
| 684477 | N/A | N/A | 5500 | 5515 | CGTTGGCTCCGCTGCT | 72 | 5066 |
| 684483 | N/A | N/A | 5539 | 5554 | TCCCGATCCTCAGGGT | 128 | 5067 |
| 684489 | N/A | N/A | 5560 | 5575 | TACAGCCCAAAGGAAC | 113 | 5068 |
| 684501 | N/A | N/A | 7177 | 7192 | ACGGAGGCGCGCGCAG | 83 | 5069 |
| 684507 | N/A | N/A | 7225 | 7240 | CCTGCGAGGAGAGCGC | 72 | 5070 |
| 684513 | N/A | N/A | 29345 | 29360 | AAGATGCTAGGCAGAA | 31 | 5071 |
| | | | 29290 | 29305 | | | |
| 684519 | N/A | N/A | 29314 | 29329 | GTAAGATGTAAGATGT | 43 | 5072 |
| | | | 29321 | 29336 | | | |
| 684521 | N/A | N/A | 3218 | 3233 | CCACACCCAGAGCCCG | 132 | 5073 |
| 684527 | N/A | N/A | 7342 | 7357 | ACTCACGCTGACGATC | 55 | 5074 |
| 684533 | N/A | N/A | 11320 | 11335 | GATTACTTAACAAGTA | 50 | 5075 |
| 684539 | N/A | N/A | 15284 | 15299 | CACCTCAGCATGAAAA | 64 | 5076 |
| 684545 | N/A | N/A | 19378 | 19393 | TTATACCCTTGTTGGA | 78 | 5077 |
| 684550 | N/A | N/A | 23171 | 23186 | ACTGTTGCAACGAAGA | 42 | 5078 |
| 684554 | N/A | N/A | 25990 | 26005 | GATTAAGACATTTTGG | 43 | 5079 |
| 684563 | N/A | N/A | 32257 | 32272 | ACCTGAATACTGTCTT | 19 | 5080 |
| 684569 | N/A | N/A | 36282 | 36297 | CAGTATGACTGGGAAG | 61 | 5081 |
| 684572 | 1003 | 1018 | 37366 | 37381 | TGTTAGGATGTAAAGT | 41 | 5082 |
| 684575 | 1240 | 1255 | 37603 | 37618 | TCACACAGAGGTTCGG | 34 | 5083 |

TABLE 5
Percent control of human PMP22 RNA with 3-10-3 cEt gapmers

| | SEQ | SEQ | SEQ | SEQ | | | |
|---|---|---|---|---|---|---|---|
| | ID | ID | ID | ID | | | |
| | NO: 1 | NO: 1 | NO: 2 | NO: 2 | | PMP22 | SEQ |
| Compound | Start | Stop | Start | Stop | | (% | ID |
| Number | Site | Site | Site | Site | Sequence (5′ to 3′) | UTC) | NO |
| 597005 | 431 | 446 | 28404 | 28419 | TCATGGTGGCCTGGAC | 24 | 5084 |
| 684108 | 2 | 17 | 2645 | 2660 | CGTCTTTCCAGTTTAT | 83 | 262 |
| 684114 | 28 | 43 | 2671 | 2686 | CTCCCTGTAACTGAAG | 97 | 186 |
| 684120 | 57 | 72 | 2700 | 2715 | CAGGCTCCCCGAGATG | 83 | 110 |
| 684126 | 78 | 93 | 2721 | 2736 | ACTAAGCCTGCAGCTT | 90 | 190 |
| 684133 | 103 | 118 | 2746 | 2761 | GCAGTCAGAGACCCGC | 103 | 267 |
| 684140 | 144 | 159 | 2787 | 2802 | GCCAAATGCAAGGGAT | 107 | 37 |
| 684146 | 174 | 189 | 2817 | 2832 | AACCCCTTCTTCCAAG | 96 | 947 |
| 684152 | 216 | 231 | 7251 | 7266 | GCAAGTTCTGCTCAGC | 15 | 5085 |
| 684158 | 238 | 253 | 7273 | 7288 | CAACAGGAGGAGCATT | 59 | 5086 |
| 684164 | 260 | 275 | 7295 | 7310 | CGTGGAGGACGATGAT | 53 | 5087 |
| 684170 | 309 | 324 | N/A | N/A | ATCCATTGGCTGACGA | 71 | 5088 |
| 684176 | 326 | 341 | 8817 | 8832 | CGTGTCCATTGCCCAC | 36 | 5089 |
| 684182 | 360 | 375 | 8851 | 8866 | GAAGAGGTGCTACAGT | 24 | 5090 |
| 684188 | 396 | 411 | 8887 | 8902 | GGTGATGATGAGAAAC | 52 | 5091 |
| 684200 | 451 | 466 | 28424 | 28439 | GCTGAAGATGATCGAC | 39 | 5092 |
| 684206 | 504 | 519 | 28477 | 28492 | CCCCCCTTGGTGAGGG | 93 | 5093 |
| 684212 | 520 | 535 | 28493 | 28508 | AGTGATGTAAAACCTG | 29 | 5094 |
| 684218 | 546 | 561 | N/A | N/A | AGACCAGCAAGAATTT | 72* | 5095 |
| 684225 | 569 | 584 | 36932 | 36947 | TGGCCGCAGCACTCAT | 9* | 5096 |
| 684232 | 599 | 614 | 36962 | 36977 | GATGCCACTCCGGGTG | 2* | 5097 |
| 684238 | 619 | 634 | 36982 | 36997 | GTAGGAGTAATCCGAG | 5* | 5098 |
| 684244 | 673 | 688 | 37036 | 37051 | ACCGCTGAGAAGGGCC | 47 | 5099 |
| 684250 | 692 | 707 | 37055 | 37070 | GCAAGATCACATAGAT | 38 | 5100 |
| 684256 | 739 | 754 | 37102 | 37117 | CGCTCAGAGCCTCAGA | 31 | 5101 |
| 684262 | 795 | 810 | 37158 | 37173 | GCTAGCTCTTTTTTCT | 59 | 5102 |
| 684273 | 889 | 904 | 37252 | 37267 | TTTATAAACCGGAGAT | 35 | 5103 |
| 684279 | 949 | 964 | 37312 | 37327 | GGTCAACATAAAAAGC | 28 | 5104 |
| 684285 | 964 | 979 | 37327 | 37342 | CAACACGAGGCTGATG | 43 | 5105 |
| 684291 | 985 | 1000 | 37348 | 37363 | CTTAGCTACTTCTTTA | 30 | 5106 |
| 684296 | 1004 | 1019 | 37367 | 37382 | CTGTTAGGATGTAAAG | 20 | 5107 |
| 684301 | 1023 | 1038 | 37386 | 37401 | AATACTGAGCTGGATT | 33 | 5108 |
| 684307 | 1114 | 1129 | 37477 | 37492 | AGGTATCTTCTTTCAG | 22 | 5109 |
| 684313 | 1143 | 1158 | 37506 | 37521 | GGTTTTCTAAATGAGG | 6 | 5110 |
| 684318 | 1177 | 1192 | 37540 | 37555 | GCTTTTGGACATTTGG | 11 | 5111 |
| 684324 | 1204 | 1219 | 37567 | 37582 | ATGCACTGGGTCACCC | 40 | 5112 |
| 684330 | 1225 | 1240 | 37588 | 37603 | GGCAGCGGCTGTTTCT | 12 | 5113 |
| 684335 | 1242 | 1257 | 37605 | 37620 | CTTCACACAGAGGTTC | 45 | 5114 |
| 684341 | 1283 | 1298 | 37646 | 37661 | AAGGGCTCCAGTTTGG | 16 | 5115 |
| 684347 | 1306 | 1321 | 37669 | 37684 | AATGCCACAAGCCGTG | 27 | 5116 |
| 684353 | 1319 | 1334 | 37682 | 37697 | GGGCAAGTATGCCAAT | 46 | 5117 |
| 684359 | 1337 | 1352 | 37700 | 37715 | AAGATACTCCACCTGT | 33 | 5118 |
| 684365 | 1361 | 1376 | 37724 | 37739 | GATTTCTCATTTAGAT | 36 | 5119 |
| 684371 | 1395 | 1410 | 37758 | 37773 | ATCCATAGCACCATTT | 16 | 5120 |
| 684377 | 1419 | 1434 | 37782 | 37797 | ATTAGTGATAATAAGG | 6 | 5121 |
| 684384 | 1440 | 1455 | 37803 | 37818 | TTCCAGTGAGTTGTTT | 20 | 5122 |
| 684389 | 1474 | 1489 | 37837 | 37852 | ATTCTATCTTATGTTG | 28 | 5123 |
| 684395 | 1492 | 1507 | 37855 | 37870 | AGAATTATTCAGGTCT | 23 | 5124 |
| 684401 | 1536 | 1551 | 37899 | 37914 | GCCTAGCTAGGTACAA | 38 | 5125 |
| 684407 | 1570 | 1585 | 37933 | 37948 | GCTTTATGATTTACTC | 6 | 5126 |
| 684413 | 1600 | 1615 | 37963 | 37978 | GACCGTAAGAAAAATG | 41 | 5127 |
| 684419 | 1631 | 1646 | 37994 | 38009 | CAAGGAGTCTAGACGC | 63 | 5128 |
| 684425 | 1653 | 1668 | 38016 | 38031 | AAGCTCTAGGAACTCA | 25 | 5129 |
| 684433 | 1675 | 1690 | 38038 | 38053 | ACAGAACAGCCTAGAC | 82 | 5130 |
| 684438 | 1699 | 1714 | 38062 | 38077 | CATTGCCAGACAGTCC | 24 | 5131 |
| 684444 | 1719 | 1734 | 38082 | 38097 | AGTTGGTGGCCAATAC | 33 | 5132 |
| 684449 | 1746 | 1761 | 38109 | 38124 | TCAGAAGGGCACCATA | 45 | 5133 |
| 684455 | 1765 | 1780 | 38128 | 38143 | AAGGTCTGGAGTCTTA | 43 | 5134 |
| 684461 | 1816 | 1831 | 38179 | 38194 | ATCTTAGTCCACACAG | 20 | 5135 |
| 684466 | 1842 | 1857 | 38205 | 38220 | AGTTACTCTGATGTTT | 23 | 5136 |
| 684472 | N/A | N/A | 5457 | 5472 | TGCGCGCGCGCGAAGC | 76 | 5137 |
| 684478 | N/A | N/A | 5514 | 5529 | CACAAACTCGGGTGCG | 75 | 5138 |
| 684484 | N/A | N/A | 5544 | 5559 | AGCTGTCCCGATCCTC | 56 | 5139 |
| 684502 | N/A | N/A | 7181 | 7196 | AGCGACGGAGGCGCGC | 78 | 5140 |
| 684508 | N/A | N/A | 7230 | 7245 | TTCTGCCTGCGAGGAG | 43 | 5141 |
| 684514 | N/A | N/A | 29291 | 29306 | TAAGATGCTAGGCAGA | 16 | 5142 |
| | N/A | N/A | 29346 | 29361 | | | |
| 684520 | N/A | N/A | 29317 | 29332 | GATGTAAGATGTAAGA | 39 | 5143 |
| | N/A | N/A | 29324 | 29339 | | | |
| 684522 | N/A | N/A | 3871 | 3886 | AATTGCCACCACTATT | 73 | 5144 |
| 684528 | N/A | N/A | 7992 | 8007 | TTACAATGTGCCTTAA | 51 | 5145 |
| 684534 | N/A | N/A | 11970 | 11985 | ACGAATATCCCCACAC | 24 | 5146 |
| 684540 | N/A | N/A | 15938 | 15953 | AAATCCAGAGCCATTC | 35 | 5147 |
| 684546 | N/A | N/A | 20032 | 20047 | GCCCAAACCTCCCAAC | 77 | 5148 |
| 684551 | N/A | N/A | 23823 | 23838 | AAAGGTGCCCAACCTC | 45 | 5149 |
| 684555 | N/A | N/A | 26667 | 26682 | GATAATGTTCTCATAA | 38 | 5150 |
| 684564 | N/A | N/A | 33017 | 33032 | AAGGCACCCCACTAAT | 64 | 5151 |
| 684571 | 865 | 880 | 37228 | 37243 | CATCTTCAATCAACAG | 11 | 5152 |

TABLE 6
Percent control of human PMP22 RNA with 3-10-3 cEt gapmers

| | SEQ | SEQ | SEQ | SEQ | | | |
|---|---|---|---|---|---|---|---|
| | ID | ID | ID | ID | | | |
| | NO: 1 | NO: 1 | NO: 2 | NO: 2 | | PMP22 | SEQ |
| Compound | Start | Stop | Start | Stop | | (% | ID |
| Number | Site | Site | Site | Site | Sequence (5′ to 3′) | UTC) | NO |
| 684109 | 16 | 31 | 2659 | 2674 | GAAGCCAGACCAGGCG | 154 | 939 |
| 684115 | 31 | 46 | 2674 | 2689 | GTGCTCCCTGTAACTG | 85 | 109 |
| 684121 | 60 | 75 | 2703 | 2718 | AACCAGGCTCCCCGAG | 127 | 942 |
| 684127 | 82 | 97 | 2725 | 2740 | ACAGACTAAGCCTGCA | 128 | 191 |
| 684134 | 113 | 128 | 2756 | 2771 | TCCCCACAGGGCAGTC | 87 | 2611 |
| 684141 | 148 | 163 | 2791 | 2806 | TGCAGCCAAATGCAAG | 86 | 38 |
| 684147 | 191 | 206 | N/A | N/A | GCCCGGCCAAACAGCG | 99 | 39 |
| 684153 | 221 | 236 | 7256 | 7271 | TGGCGGCAAGTTCTGC | 36 | 5153 |
| 684159 | 244 | 259 | 7279 | 7294 | ACTCAGCAACAGGAGG | 48 | 5154 |
| 684165 | 274 | 289 | 7309 | 7324 | CACCAGCACCGCGACG | 35 | 5155 |
| 684171 | 311 | 326 | N/A | N/A | CGATCCATTGGCTGAC | 79 | 5156 |
| 684177 | 340 | 355 | 8831 | 8846 | CCAGAGATCAGTTGCG | 33 | 5157 |
| 684183 | 374 | 389 | 8865 | 8880 | GGACATTTCCTGAGGA | 23 | 5158 |
| 684189 | 401 | 416 | 8892 | 8907 | CGTTTGGTGATGATGA | 35 | 5159 |
| 684194 | 433 | 448 | 28406 | 28421 | GATCATGGTGGCCTGG | 52 | 5160 |
| 684201 | 454 | 469 | 28427 | 28442 | AATGCTGAAGATGATC | 74 | 5161 |
| 684207 | 509 | 524 | 28482 | 28497 | ACCTGCCCCCCTTGGT | 76 | 5162 |
| 684213 | 526 | 541 | 28499 | 28514 | GATTCCAGTGATGTAA | 71 | 5163 |
| 684219* | 550 | 565 | N/A | N/A | GCACAGACCAGCAAGA | 36 | 5164 |
| 684226* | 574 | 589 | 36937 | 36952 | GTAGATGGCCGCAGCA | 20 | 5165 |
| 684233* | 604 | 619 | 36967 | 36982 | GTTGAGATGCCACTCC | 19 | 5166 |
| 684239* | 623 | 638 | 36986 | 37001 | AACCGTAGGAGTAATC | 59 | 5167 |
| 684245 | 675 | 690 | 37038 | 37053 | ACACCGCTGAGAAGGG | 33 | 5168 |
| 684251 | 693 | 708 | 37056 | 37071 | CGCAAGATCACATAGA | 20 | 5169 |
| 684257 | 740 | 755 | 37103 | 37118 | ACGCTCAGAGCCTCAG | 30 | 5170 |
| 684263 | 800 | 815 | 37163 | 37178 | TTTGGGCTAGCTCTTT | 16 | 5171 |
| 684268 | 869 | 884 | 37232 | 37247 | TATACATCTTCAATCA | 36 | 5172 |
| 684274 | 893 | 908 | 37256 | 37271 | AGGTTTTATAAACCGG | 57 | 5173 |
| 684280 | 952 | 967 | 37315 | 37330 | GATGGTCAACATAAAA | 16 | 5174 |
| 684286 | 967 | 982 | 37330 | 37345 | GCTCAACACGAGGCTG | 22 | 5175 |
| 684292 | 987 | 1002 | 37350 | 37365 | TCCTTAGCTACTTCTT | 22 | 5176 |
| 684297 | 1007 | 1022 | 37370 | 37385 | ATACTGTTAGGATGTA | 32 | 5177 |
| 684302 | 1072 | 1087 | 37435 | 37450 | TATCTTATTTCTGGGT | 21 | 5178 |
| 684308 | 1118 | 1133 | 37481 | 37496 | AGGGAGGTATCTTCTT | 48 | 5179 |
| 684314 | 1152 | 1167 | 37515 | 37530 | CCACACTTTGGTTTTC | 26 | 5180 |
| 684319 | 1182 | 1197 | 37545 | 37560 | AAAGGGCTTTTGGACA | 43 | 5181 |
| 684325 | 1205 | 1220 | 37568 | 37583 | GATGCACTGGGTCACC | 31 | 5182 |
| 684331 | 1230 | 1245 | 37593 | 37608 | GTTCGGGCAGCGGCTG | 23 | 5183 |
| 684336 | 1245 | 1260 | 37608 | 37623 | AAGCTTCACACAGAGG | 43 | 5184 |
| 684342 | 1287 | 1302 | 37650 | 37665 | TTGCAAGGGCTCCAGT | 72 | 5185 |
| 684348 | 1308 | 1323 | 37671 | 37686 | CCAATGCCACAAGCCG | 28 | 5186 |
| 684354 | 1323 | 1338 | 37686 | 37701 | GTAAGGGCAAGTATGC | 37 | 5187 |
| 684360 | 1341 | 1356 | 37704 | 37719 | GACGAAGATACTCCAC | 13 | 5188 |
| 684366 | 1373 | 1388 | 37736 | 37751 | CTTGTTGTCACTGATT | 11 | 5189 |
| 684372 | 1398 | 1413 | 37761 | 37776 | TAAATCCATAGCACCA | 21 | 5190 |
| 684378 | 1424 | 1439 | 37787 | 37802 | AGATGATTAGTGATAA | 33 | 5191 |
| 684385 | 1444 | 1459 | 37807 | 37822 | GGATTTCCAGTGAGTT | 11 | 5192 |
| 684390 | 1476 | 1491 | 37839 | 37854 | CCATTCTATCTTATGT | 35 | 5193 |
| 684396 | 1518 | 1533 | 37881 | 37896 | GCAGTTATAAACCATT | 11 | 5194 |
| 684402 | 1541 | 1556 | 37904 | 37919 | TAGCAGCCTAGCTAGG | 71 | 5195 |
| 684408 | 1575 | 1590 | 37938 | 37953 | TGAAGGCTTTATGATT | 36 | 5196 |
| 684414 | 1602 | 1617 | 37965 | 37980 | CCGACCGTAAGAAAAA | 59 | 5197 |
| 684420 | 1634 | 1649 | 37997 | 38012 | TCCCAAGGAGTCTAGA | 88 | 5198 |
| 684426 | 1657 | 1672 | 38020 | 38035 | AGCCAAGCTCTAGGAA | 60 | 5199 |
| 684434 | 1684 | 1699 | 38047 | 38062 | CTTGGAGGCACAGAAC | 87 | 5200 |
| 684439 | 1702 | 1717 | 38065 | 38080 | AGTCATTGCCAGACAG | 26 | 5201 |
| 684445 | 1721 | 1736 | 38084 | 38099 | ACAGTTGGTGGCCAAT | 18 | 5202 |
| 684450 | 1751 | 1766 | 38114 | 38129 | TAGCATCAGAAGGGCA | 53 | 5203 |
| 684456 | 1768 | 1783 | 38131 | 38146 | CAAAAGGTCTGGAGTC | 43 | 5204 |
| 684462 | 1820 | 1835 | 38183 | 38198 | ATGCATCTTAGTCCAC | 10 | 5205 |
| 684467 | 1846 | 1861 | 38209 | 38224 | AGTGAGTTACTCTGAT | 64 | 5206 |
| 684473 | N/A | N/A | 5475 | 5490 | AAAGCTGCGCTGCGGG | 91 | 5207 |
| 684479 | N/A | N/A | 5517 | 5532 | AAACACAAACTCGGGT | 84 | 5208 |
| 684485 | N/A | N/A | 5548 | 5563 | GAACAGCTGTCCCGAT | 106 | 5209 |
| 684503 | N/A | N/A | 7186 | 7201 | GGCCGAGCGACGGAGG | 97 | 5210 |
| 684509 | N/A | N/A | 7235 | 7250 | GGAGTTTCTGCCTGCG | 36 | 5211 |
| 684510 | N/A | N/A | 24288 | 24303 | TAGAACATATCATAGA | 68 | 5212 |
| | | | 24330 | 24345 | | | |
| 684515 | N/A | N/A | 29292 | 29307 | GTAAGATGCTAGGCAG | 21 | 5213 |
| | | | 29347 | 29362 | | | |
| 684523 | N/A | N/A | 4523 | 4538 | GCAGAGGCGCGCCCAA | 109 | 5214 |
| 684529 | N/A | N/A | 8642 | 8657 | CTTAAAAGCACCTTGT | 57 | 5215 |
| 684535 | N/A | N/A | 12645 | 12660 | GACCATGTCACATTTC | 29 | 5216 |
| 684541 | N/A | N/A | 16591 | 16606 | GTTCATCTCTGTGCAC | 23 | 5217 |
| 684556 | N/A | N/A | 27318 | 27333 | GCCCAGGGTAAAAATC | 113 | 5218 |
| 684559 | N/A | N/A | 29359 | 29374 | GTAAGAGCTAATGTAA | 55 | 5219 |
| 684565 | N/A | N/A | 33669 | 33684 | AGTGATCCAACAAATT | 43 | 5220 |
| 684570 | N/A | N/A | 20245 | 20260 | GGGCAATTCATAAAAC | 91 | 5221 |

TABLE 7
Percent control of human PMP22 RNA with 3-10-3 cEt gapmers

| | SEQ | SEQ | SEQ | SEQ | SEQ | SEQ | | | |
|---|---|---|---|---|---|---|---|---|---|
| | ID | ID | ID | ID | ID | ID | | | |
| | NO: | NO: | NO: | NO: | NO: | NO: | | | |
| | 4 | 4 | 5 | 5 | 8 | 8 | | PMP22 | SEQ |
| Compound | Start | Stop | Start | Stop | Start | Stop | | (% | ID |
| Number | Site | Site | Site | Site | Site | Site | Sequence (5′ to 3′) | UTC) | NO |
| 684105 | N/A | N/A | N/A | N/A | 470 | 485 | AAGGAGTAATCCGAGT | 20 | 5222 |
| 684106 | N/A | N/A | N/A | N/A | 696 | 711 | GGATATTATATACATC | 88 | 5223 |
| 684107 | N/A | N/A | N/A | N/A | 711 | 726 | GGTTTTATAAACCGGG | 21 | 5224 |
| 684490 | 154 | 169 | N/A | N/A | N/A | N/A | CTGCTTACAGCCCAAA | 75 | 5225 |
| 684491 | 159 | 174 | N/A | N/A | N/A | N/A | AGTTTCTGCTTACAGC | 83 | 5226 |
| 684492 | 164 | 179 | N/A | N/A | N/A | N/A | AGCGGAGTTTCTGCTT | 95 | 5227 |
| 684493 | N/A | N/A | 191 | 206 | N/A | N/A | TTCCGGCCAAACAGCG | 97 | 5228 |
| 684494 | N/A | N/A | 196 | 211 | N/A | N/A | GGAGTTTCCGGCCAAA | 125 | 5229 |
| 684495 | N/A | N/A | 201 | 216 | N/A | N/A | TCAGCGGAGTTTCCGG | 75 | 5230 |
| 684496 | N/A | N/A | N/A | N/A | 44 | 59 | TGCAGCCCAAAGGAAC | 92 | 5231 |
| 684497 | N/A | N/A | N/A | N/A | 49 | 64 | GTTTCTGCAGCCCAAA | 86 | 5232 |
| 684498 | N/A | N/A | N/A | N/A | 54 | 69 | GCGGAGTTTCTGCAGC | 38 | 5233 |

### Example 2 Effect of 3-10-3 cEt Gapmer Modified Oligonucleotides on Human PMP22 RNA In Vitro, Single Dose

[0361] Modified oligonucleotides complementary to human PMP22 nucleic acid were tested for their effect on PMP22 RNA levels in vitro.

[0362] Modified oligonucleotides in the tables below are 3-10-3 cEt gapmers. The modified oligonucleotides are 16 nucleosides in length, wherein the central gap segment consists of ten 2′-β-D-deoxynucleosides and is flanked by wing segments at the 5′ end and the 3′ end having three nucleosides each. Each nucleoside of the 5′ wing segment and each nucleoside in the 3′ wing segment is a cEt nucleoside. All internucleoside linkages are phosphorothioate (P═S) linkages. All cytosine residues are 5-methylcytosines.

[0363] “Start site” indicates the 5′-most nucleoside to which the modified oligonucleotide is complementary in the human gene sequence. “Stop site” indicates the 3′-most nucleoside to which the modified oligonucleotide is complementary in the human gene sequence. Each modified oligonucleotide listed in the Tables below is 100% complementary to SEQ ID NO: 1 (GENBANK Accession No. NM_000304.3) and/or SEQ ID NO: 2 (GENBANK Accession No. NC_000017.11 truncated from nucleotides 15227001 to 15268000). ‘N/A’ indicates that the modified oligonucleotide is not 100% complementary to that particular gene sequence

[0364] Cultured K-562 cells at a density of 50,000 cells per well were treated with 10,000 nM of modified oligonucleotide by electroporation. After a treatment period of approximately 24 hours, total RNA was isolated from the cells and PMP22 RNA levels were measured by quantitative real-time RTPCR. RTS4579, described herein above, was used to measure RNA levels. PMP22 RNA levels were adjusted according to total RNA content, as measured by RIBOGREEN®. Results are presented in the tables below as percent PMP22 RNA levels relative to untreated control cells. The values marked with an asterisk (*) indicate that the modified oligonucleotide is complementary to the amplicon region of the primer probe set. Additional assays may be used to measure the potency and efficacy of the modified oligonucleotides complementary to the amplicon region.

TABLE 8
Percent control of human PMP22 RNA with 3-10-3 cEt gapmers

| | SEQ | SEQ | SEQ | SEQ | | | |
|---|---|---|---|---|---|---|---|
| | ID | ID | ID | ID | | | |
| | NO: 1 | NO: 1 | NO: 2 | NO: 2 | | | SEQ |
| Compound | Start | Stop | Start | Stop | | PMP22 | ID |
| Number | Site | Site | Site | Site | Sequence (5′ to 3′) | (% UTC) | NO |
| 596957 | 1105 | 1120 | 37468 | 37483 | CTTTCAGATGAAAGGG | 21 | 5234 |
| 596988 | 1724 | 1739 | 38087 | 38102 | TCTACAGTTGGTGGCC | 22 | 5235 |
| 597028 | 876 | 891 | 37239 | 37254 | GATATTATATACATCT | 75 | 5236 |
| 597029 | 896 | 911 | 37259 | 37274 | AATAGGTTTTATAAAC | 97 | 5237 |
| 684266 | 863 | 878 | 37226 | 37241 | TCTTCAATCAACAGCA | 9 | 4965 |
| 684267 | 864 | 879 | 37227 | 37242 | ATCTTCAATCAACAGC | 6 | 30 |
| 684277 | 905 | 920 | 37268 | 37283 | AGTGTTATAAATAGGT | 5 | 40 |
| 684571 | 865 | 880 | 37228 | 37243 | CATCTTCAATCAACAG | 10 | 5152 |
| 718269 | 1 | 16 | 2644 | 2659 | GTCTTTCCAGTTTATT | 93 | 5238 |
| 718270 | 27 | 42 | 2670 | 2685 | TCCCTGTAACTGAAGC | 99 | 118 |
| 718271 | 29 | 44 | 2672 | 2687 | GCTCCCTGTAACTGAA | 113 | 41 |
| 718272 | 324 | 339 | 8815 | 8830 | TGTCCATTGCCCACGA | 24 | 5239 |
| 718273 | 325 | 340 | 8816 | 8831 | GTGTCCATTGCCCACG | 38 | 5240 |
| 718274 | 344 | 359 | 8835 | 8850 | TCTGCCAGAGATCAGT | 60 | 5241 |
| 718275 | 346 | 361 | 8837 | 8852 | GTTCTGCCAGAGATCA | 9 | 5242 |
| 718276 | 347 | 362 | 8838 | 8853 | AGTTCTGCCAGAGATC | 13 | 5243 |
| 718277 | 348 | 363 | 8839 | 8854 | CAGTTCTGCCAGAGAT | 16 | 5244 |
| 718278 | 349 | 364 | 8840 | 8855 | ACAGTTCTGCCAGAGA | 16 | 5245 |
| 718279 | 416 | 431 | 28389 | 28404 | CAGACTGCAGCCATTC | 10 | 5246 |
| 718280 | 418 | 433 | 28391 | 28406 | GACAGACTGCAGCCAT | 20 | 5247 |
| 718281 | 419 | 434 | 28392 | 28407 | GGACAGACTGCAGCCA | 48 | 5248 |
| 718282 | 478 | 493 | 28451 | 28466 | GCAGAAGAACAGGAAC | 50 | 5249 |
| 718283 | 480 | 495 | 28453 | 28468 | TGGCAGAAGAACAGGA | 86 | 5250 |
| 718284 | 522 | 537 | 28495 | 28510 | CCAGTGATGTAAAACC | 64 | 5251 |
| 718285 | 523 | 538 | 28496 | 28511 | TCCAGTGATGTAAAAC | 85 | 5252 |
| 718286 | 552 | 567 | N/A | N/A | ACGCACAGACCAGCAA | 30* | 5253 |
| 718287 | 553 | 568 | N/A | N/A | CACGCACAGACCAGCA | 13* | 5254 |
| 718288 | 555 | 570 | N/A | N/A | ATCACGCACAGACCAG | 9* | 5255 |
| 718289 | 557 | 572 | 36920 | 36935 | TCATCACGCACAGACC | 8* | 5256 |
| 718290 | 558 | 573 | 36921 | 36936 | CTCATCACGCACAGAC | 11* | 5257 |
| 718291 | 560 | 575 | 36923 | 36938 | CACTCATCACGCACAG | 9* | 34 |
| 718292 | 561 | 576 | 36924 | 36939 | GCACTCATCACGCACA | 5* | 35 |
| 718293 | 797 | 812 | 37160 | 37175 | GGGCTAGCTCTTTTTT | 31 | 5258 |
| 718294 | 862 | 877 | 37225 | 37240 | CTTCAATCAACAGCAA | 11 | 36 |
| 718295 | 866 | 881 | 37229 | 37244 | ACATCTTCAATCAACA | 20 | 5259 |
| 718296 | 867 | 882 | 37230 | 37245 | TACATCTTCAATCAAC | 17 | 5260 |
| 718297 | 868 | 883 | 37231 | 37246 | ATACATCTTCAATCAA | 15 | 5261 |
| 718298 | 871 | 886 | 37234 | 37249 | TATATACATCTTCAAT | 65 | 5262 |
| 718299 | 872 | 887 | 37235 | 37250 | TTATATACATCTTCAA | 33 | 5263 |
| 718300 | 873 | 888 | 37236 | 37251 | ATTATATACATCTTCA | 6 | 5264 |
| 718301 | 874 | 889 | 37237 | 37252 | TATTATATACATCTTC | 33 | 5265 |
| 718302 | 877 | 892 | 37240 | 37255 | AGATATTATATACATC | 72 | 5266 |
| 718303 | 902 | 917 | 37265 | 37280 | GTTATAAATAGGTTTT | 15 | 5267 |
| 718304 | 903 | 918 | 37266 | 37281 | TGTTATAAATAGGTTT | 55 | 5268 |
| 718305 | 906 | 921 | 37269 | 37284 | AAGTGTTATAAATAGG | 32 | 5269 |
| 718306 | 907 | 922 | 37270 | 37285 | AAAGTGTTATAAATAG | 59 | 5270 |
| 718307 | 911 | 926 | 37274 | 37289 | GTAAAAAGTGTTATAA | 76 | 5271 |
| 718308 | 912 | 927 | 37275 | 37290 | TGTAAAAAGTGTTATA | 89 | 5272 |
| 718309 | 913 | 928 | 37276 | 37291 | ATGTAAAAAGTGTTAT | 107 | 5273 |
| 718310 | 914 | 929 | 37277 | 37292 | TATGTAAAAAGTGTTA | 67 | 5274 |
| 718311 | 915 | 930 | 37278 | 37293 | ATATGTAAAAAGTGTT | 75 | 5275 |
| 718312 | 916 | 931 | 37279 | 37294 | TATATGTAAAAAGTGT | 97 | 5276 |
| 718313 | 948 | 963 | 37311 | 37326 | GTCAACATAAAAAGCA | 22 | 5277 |
| 718314 | 1002 | 1017 | 37365 | 37380 | GTTAGGATGTAAAGTT | 9 | 5278 |
| 718315 | 1203 | 1218 | 37566 | 37581 | TGCACTGGGTCACCCA | 19 | 5279 |
| 718316 | 1610 | 1625 | 37973 | 37988 | CTGATGCTCCGACCGT | 11 | 5280 |
| 718317 | 1683 | 1698 | 38046 | 38061 | TTGGAGGCACAGAACA | 68 | 5281 |
| 718318 | 1685 | 1700 | 38048 | 38063 | CCTTGGAGGCACAGAA | 58 | 5282 |
| 718319 | 1686 | 1701 | 38049 | 38064 | TCCTTGGAGGCACAGA | 36 | 5283 |
| 718320 | 1688 | 1703 | 38051 | 38066 | AGTCCTTGGAGGCACA | 31 | 5284 |
| 718321 | 1690 | 1705 | 38053 | 38068 | ACAGTCCTTGGAGGCA | 18 | 5285 |
| 718322 | 1691 | 1706 | 38054 | 38069 | GACAGTCCTTGGAGGC | 27 | 5286 |
| 718323 | 1693 | 1708 | 38056 | 38071 | CAGACAGTCCTTGGAG | 24 | 5287 |
| 718324 | 1695 | 1710 | 38058 | 38073 | GCCAGACAGTCCTTGG | 54 | 5288 |
| 718325 | 1712 | 1727 | 38075 | 38090 | GGCCAATACAAGTCAT | 70 | 5289 |
| 718326 | 1713 | 1728 | 38076 | 38091 | TGGCCAATACAAGTCA | 43 | 5290 |
| 718327 | 1715 | 1730 | 38078 | 38093 | GGTGGCCAATACAAGT | 42 | 5291 |
| 718328 | 1716 | 1731 | 38079 | 38094 | TGGTGGCCAATACAAG | 33 | 5292 |
| 718329 | 1717 | 1732 | 38080 | 38095 | TTGGTGGCCAATACAA | 41 | 5293 |
| 718330 | 1718 | 1733 | 38081 | 38096 | GTTGGTGGCCAATACA | 34 | 5294 |
| 718331 | 1720 | 1735 | 38083 | 38098 | CAGTTGGTGGCCAATA | 31 | 5295 |
| 718332 | 1722 | 1737 | 38085 | 38100 | TACAGTTGGTGGCCAA | 21 | 5296 |
| 718333 | 1723 | 1738 | 38086 | 38101 | CTACAGTTGGTGGCCA | 33 | 5297 |
| 718334 | 1726 | 1741 | 38089 | 38104 | CATCTACAGTTGGTGG | 23 | 5298 |
| 718335 | 1727 | 1742 | 38090 | 38105 | ACATCTACAGTTGGTG | 21 | 5299 |
| 718336 | 1728 | 1743 | 38091 | 38106 | TACATCTACAGTTGGT | 12 | 5300 |
| 718337 | 1730 | 1745 | 38093 | 38108 | TATACATCTACAGTTG | 48 | 5301 |
| 718338 | 1731 | 1746 | 38094 | 38109 | ATATACATCTACAGTT | 86 | 5302 |

TABLE 9
Percent control of human PMP22 RNA with 3-10-3 cEt gapmers

| | SEQ | SEQ | SEQ | SEQ | | | |
|---|---|---|---|---|---|---|---|
| | ID | ID | ID | ID | | | |
| | NO: 1 | NO: 1 | NO: 2 | NO: 2 | | | SEQ |
| Compound | Start | Stop | Start | Stop | | PMP22 | ID |
| Number | Site | Site | Site | Site | Sequence (5′ to 3′) | (% UTC) | NO |
| 596994 | 1815 | 1830 | 38178 | 38193 | TCTTAGTCCACACAGT | 24 | 5303 |
| 596996 | 1843 | 1858 | 38206 | 38221 | GAGTTACTCTGATGTT | 32 | 5304 |
| 684277 | 905 | 920 | 37268 | 37283 | AGTGTTATAAATAGGT | 6 | 40 |
| 684453 | 1758 | 1773 | 38121 | 38136 | GGAGTCTTAGCATCAG | 14 | 4995 |
| 684457 | 1801 | 1816 | 38164 | 38179 | GTTGGTATAAAATCAG | 11 | 4865 |
| 684462 | 1820 | 1835 | 38183 | 38198 | ATGCATCTTAGTCCAC | 7 | 5205 |
| 718339 | 1732 | 1747 | 38095 | 38110 | TATATACATCTACAGT | 68 | 5305 |
| 718340 | 1754 | 1769 | 38117 | 38132 | TCTTAGCATCAGAAGG | 35 | 5306 |
| 718341 | 1756 | 1771 | 38119 | 38134 | AGTCTTAGCATCAGAA | 11 | 5307 |
| 718342 | 1757 | 1772 | 38120 | 38135 | GAGTCTTAGCATCAGA | 17 | 5308 |
| 718343 | 1759 | 1774 | 38122 | 38137 | TGGAGTCTTAGCATCA | 24 | 5309 |
| 718344 | 1760 | 1775 | 38123 | 38138 | CTGGAGTCTTAGCATC | 24 | 5310 |
| 718345 | 1761 | 1776 | 38124 | 38139 | TCTGGAGTCTTAGCAT | 39 | 5311 |
| 718346 | 1762 | 1777 | 38125 | 38140 | GTCTGGAGTCTTAGCA | 26 | 5312 |
| 718347 | 1764 | 1779 | 38127 | 38142 | AGGTCTGGAGTCTTAG | 12 | 5313 |
| 718348 | 1766 | 1781 | 38129 | 38144 | AAAGGTCTGGAGTCTT | 33 | 5314 |
| 718349 | 1802 | 1817 | 38165 | 38180 | AGTTGGTATAAAATCA | 14 | 5315 |
| 718350 | 1803 | 1818 | 38166 | 38181 | CAGTTGGTATAAAATC | 32 | 5316 |
| 718351 | 1804 | 1819 | 38167 | 38182 | ACAGTTGGTATAAAAT | 47 | 5317 |
| 718352 | 1805 | 1820 | 38168 | 38183 | CACAGTTGGTATAAAA | 34 | 5318 |
| 718353 | 1806 | 1821 | 38169 | 38184 | ACACAGTTGGTATAAA | 40 | 5319 |
| 718354 | 1808 | 1823 | 38171 | 38186 | CCACACAGTTGGTATA | 23 | 5320 |
| 718355 | 1809 | 1824 | 38172 | 38187 | TCCACACAGTTGGTAT | 37 | 5321 |
| 718356 | 1811 | 1826 | 38174 | 38189 | AGTCCACACAGTTGGT | 11 | 5322 |
| 718357 | 1813 | 1828 | 38176 | 38191 | TTAGTCCACACAGTTG | 30 | 5323 |
| 718358 | 1814 | 1829 | 38177 | 38192 | CTTAGTCCACACAGTT | 10 | 5324 |
| 718359 | 1817 | 1832 | 38180 | 38195 | CATCTTAGTCCACACA | 10 | 5325 |
| 718360 | 1818 | 1833 | 38181 | 38196 | GCATCTTAGTCCACAC | 4 | 5326 |
| 718361 | 1819 | 1834 | 38182 | 38197 | TGCATCTTAGTCCACA | 11 | 5327 |
| 718362 | 1839 | 1854 | 38202 | 38217 | TACTCTGATGTTTATT | 28 | 5328 |
| 718363 | 1840 | 1855 | 38203 | 38218 | TTACTCTGATGTTTAT | 27 | 5329 |
| 718364 | 1844 | 1859 | 38207 | 38222 | TGAGTTACTCTGATGT | 23 | 5330 |
| 718365 | 1845 | 1860 | 38208 | 38223 | GTGAGTTACTCTGATG | 36 | 5331 |
| 718366 | N/A | N/A | 5414 | 5429 | TCCCCTTTAACGGGAA | 104 | 5332 |
| 718367 | N/A | N/A | 5415 | 5430 | TTCCCCTTTAACGGGA | 110 | 5333 |
| 718368 | N/A | N/A | 4674 | 4689 | GAGTCCTGGCCATGGG | 115 | 5334 |
| 718369 | N/A | N/A | 4675 | 4690 | GGAGTCCTGGCCATGG | 110 | 5335 |
| 718370 | N/A | N/A | 4676 | 4691 | TGGAGTCCTGGCCATG | 90 | 5336 |
| 718371 | N/A | N/A | 4677 | 4692 | CTGGAGTCCTGGCCAT | 108 | 5337 |
| 718372 | N/A | N/A | 4682 | 4697 | CTTGGCTGGAGTCCTG | 95 | 5338 |
| 718373 | N/A | N/A | 4683 | 4698 | CCTTGGCTGGAGTCCT | 102 | 5339 |
| 718374 | N/A | N/A | 4685 | 4700 | AGCCTTGGCTGGAGTC | 95 | 5340 |
| 718375 | N/A | N/A | 6699 | 6714 | GTTTCCCAGACCCCAG | 97 | 5341 |
| 718376 | N/A | N/A | 6700 | 6715 | GGTTTCCCAGACCCCA | 135 | 5342 |
| 718377 | N/A | N/A | 6702 | 6717 | CTGGTTTCCCAGACCC | 118 | 5343 |
| 718378 | N/A | N/A | 6705 | 6720 | AGGCTGGTTTCCCAGA | 75 | 5344 |
| 718379 | N/A | N/A | 7343 | 7358 | CACTCACGCTGACGAT | 90 | 5345 |
| 718380 | N/A | N/A | 7344 | 7359 | GCACTCACGCTGACGA | 64 | 5346 |
| 718381 | N/A | N/A | 10382 | 10397 | ATGCTGTGGCTTTGGG | 21 | 5347 |
| 718382 | N/A | N/A | 10383 | 10398 | GATGCTGTGGCTTTGG | 17 | 5348 |
| 718383 | N/A | N/A | 10539 | 10554 | CCAGATGCCACTTGGG | 75 | 5349 |
| 718384 | N/A | N/A | 10540 | 10555 | GCCAGATGCCACTTGG | 55 | 5350 |
| 718385 | N/A | N/A | 10541 | 10556 | GGCCAGATGCCACTTG | 93 | 5351 |
| 718386 | N/A | N/A | 10542 | 10557 | TGGCCAGATGCCACTT | 122 | 5352 |
| 718387 | N/A | N/A | 14660 | 14675 | TCTGATTGTGAAAATA | 12 | 5353 |
| 718388 | N/A | N/A | 19968 | 19983 | GTCATTCCAGAAATAG | 23 | 5354 |
| 718389 | N/A | N/A | 19969 | 19984 | TGTCATTCCAGAAATA | 25 | 5355 |
| 718390 | N/A | N/A | 19970 | 19985 | ATGTCATTCCAGAAAT | 37 | 5356 |
| 718391 | N/A | N/A | 19972 | 19987 | GAATGTCATTCCAGAA | 11 | 5357 |
| 718392 | N/A | N/A | 19973 | 19988 | TGAATGTCATTCCAGA | 8 | 5358 |
| 718393 | N/A | N/A | 19974 | 19989 | ATGAATGTCATTCCAG | 4 | 5359 |
| 718394 | N/A | N/A | 20446 | 20461 | TTCAAGGTCAGATTCC | 22 | 5360 |
| 718395 | N/A | N/A | 26920 | 26935 | AGATTTCCAGAGGTGT | 17 | 5361 |
| 718396 | N/A | N/A | 26921 | 26936 | GAGATTTCCAGAGGTG | 10 | 5362 |
| 718397 | N/A | N/A | 28385 | 28400 | CTGCAGCCATTCTGGG | 107 | 5363 |
| 718398 | N/A | N/A | 28386 | 28401 | ACTGCAGCCATTCTGG | 45 | 5364 |
| 718399 | N/A | N/A | 28388 | 28403 | AGACTGCAGCCATTCT | 55 | 5365 |
| 718400 | N/A | N/A | 35820 | 35835 | GCTATTTGGGCTGCTG | 30 | 5366 |
| 718401 | N/A | N/A | 35821 | 35836 | TGCTATTTGGGCTGCT | 63 | 5367 |
| 718402 | N/A | N/A | 35822 | 35837 | CTGCTATTTGGGCTGC | 23 | 5368 |
| 718403 | N/A | N/A | 35826 | 35841 | CTCACTGCTATTTGGG | 55 | 5369 |
| 718404 | N/A | N/A | 35827 | 35842 | CCTCACTGCTATTTGG | 67 | 5370 |
| 718405 | N/A | N/A | 35828 | 35843 | ACCTCACTGCTATTTG | 54 | 5371 |
| 718406 | N/A | N/A | 35830 | 35845 | TAACCTCACTGCTATT | 86 | 5372 |
| 718407 | N/A | N/A | 35831 | 35846 | CTAACCTCACTGCTAT | 90 | 5373 |
| 718408 | N/A | N/A | 36916 | 36931 | CACGCACAGACCTGGG | 26* | 4809 |
| 718409 | N/A | N/A | 36917 | 36932 | TCACGCACAGACCTGG | 26* | 4810 |
| 718410 | N/A | N/A | 36919 | 36934 | CATCACGCACAGACCT | 13* | 4811 |

### Example 3 Effect of 3-10-3 cEt Gapmer Modified Oligonucleotides on Human PMP22 RNA In Vitro, Single Dose

[0365] Modified oligonucleotides complementary to human PMP22 nucleic acid were tested for their effect on PMP22 RNA levels in vitro.

[0366] Modified oligonucleotides in the tables below are 3-10-3 cEt gapmers. The modified oligonucleotides are 16 nucleosides in length, wherein the central gap segment consists of ten 2′-β-D-deoxynucleosides and is flanked by wing segments at the 5′ end and the 3′ end having three nucleosides each. Each nucleoside of the 5′ wing segment and each nucleoside in the 3′ wing segment is a cEt nucleoside. All internucleoside linkages are phosphorothioate (P═S) linkages. All cytosine residues are 5-methylcytosines.

[0367] “Start site” indicates the 5′-most nucleoside to which the modified oligonucleotide is complementary in the human gene sequence. “Stop site” indicates the 3′-most nucleoside to which the modified oligonucleotide is complementary in the human gene sequence. Each modified oligonucleotide listed in the Tables below is 100% complementary to SEQ ID NO: 1 (GENBANK Accession No. NM_000304.3) and/or SEQ ID NO: 2 (GENBANK Accession No. NC_000017.11 truncated from nucleotides 15227001 to 15268000). ‘N/A’ indicates that the modified oligonucleotide is not 100% complementary to that particular gene sequence.

[0368] Cultured A-549 cells at a density of 15,000 cells per well were treated with 4,000 nM of modified oligonucleotide by electroporation. After a treatment period of approximately 24 hours, total RNA was isolated from the cells and PMP22 RNA levels were measured by quantitative real-time RTPCR. Human PMP22 primer probe set RTS35670 (forward sequence AGAAATCTGCTTGGAAGAAGGG, designated herein as SEQ ID NO: 9; reverse sequence ACGTGGAGGACGATGATACT, designated herein as SEQ ID NO: 10; probe sequence AGCAACAGGAGGAGCATTCTGGC, designated herein as SEQ ID NO: 11) was used to measure RNA levels. In some cases, an additional human PMP22 primer probe set RTS35667 (forward sequence GTTTGAGGCCACCCTGAG, designated herein as SEQ ID NO: 12; reverse sequence GATACTCAGCAACAGGAGGAG, designated herein as SEQ ID NO: 13; probe sequence AGTTTCTGCAGCCCAAAGGAACAG, designated herein as SEQ ID NO: 14) was also used to measure RNA levels. PMP22 RNA levels were adjusted according to total RNA content, as measured by RIBOGREEN®. Results are presented in the tables below as percent PMP22 RNA levels relative to untreated control cells. The values marked with an asterisk (*) indicate that the modified oligonucleotide is complementary to the amplicon region of the primer probe set. Additional assays may be used to measure the potency and efficacy of the modified oligonucleotides complementary to the amplicon region.

TABLE 10
Percent control of human PMP22 RNA with 3-10-3 cEt gapmers

| | SEQ | SEQ | SEQ | SEQ | | | | |
|---|---|---|---|---|---|---|---|---|
| | ID | ID | ID | ID | | | | |
| | NO: | NO: | NO: | NO: | | | PMP22 | |
| | 1 | 1 | 2 | 2 | | PMP22 | (% UTC) | SEQ |
| Compound | Start | Stop | Start | Stop | | (% UTC) | RTS | ID |
| ID | Site | Site | Site | Site | Sequence (5′ to 3′) | RTS 35670 | 35667 | NO |
| 684108 | 2 | 17 | 2645 | 2660 | CGTCTTTCCAGTTTAT | 137 | 99 | 262 |
| 684111 | 21 | 36 | 2664 | 2679 | TAACTGAAGCCAGACC | 96 | 93 | 263 |
| 684118 | 47 | 62 | 2690 | 2705 | GAGATGTTCCCTGGTG | 42 | 156 | 264 |
| 684125 | 73 | 88 | 2716 | 2731 | GCCTGCAGCTTCCAAC | 83 | 142 | 265 |
| 684128 | 87 | 102 | 2730 | 2745 | AGCCGACAGACTAAGC | 65 | 98 | 266 |
| 684133 | 103 | 118 | 2746 | 2761 | GCAGTCAGAGACCCGC | 27 | 93 | 267 |
| 684134 | 113 | 128 | 2756 | 2771 | TCCCCACAGGGCAGTC | 49 | 75 | 2611 |
| 684140 | 144 | 159 | 2787 | 2802 | GCCAAATGCAAGGGAT | 53 | 88 | 37 |
| 684141 | 148 | 163 | 2791 | 2806 | TGCAGCCAAATGCAAG | 99 | 102 | 38 |
| 684147 | 191 | 206 | N/A | N/A | GCCCGGCCAAACAGCG | 25* | 97 | 39 |
| 684277 | 905 | 920 | 37268 | 37283 | AGTGTTATAAATAGGT | 36 | 32 | 40 |
| 718271 | 29 | 44 | 2672 | 2687 | GCTCCCTGTAACTGAA | 81 | 100 | 41 |
| 866361 | 25 | 40 | 2668 | 2683 | CCTGTAACTGAAGCCA | 73 | 74 | 42 |
| 866364 | 33 | 48 | 2676 | 2691 | TGGTGCTCCCTGTAAC | 67 | 152 | 43 |
| 866367 | 38 | 53 | 2681 | 2696 | CCTGGTGGTGCTCCCT | 56 | 99 | 44 |
| 866371 | 43 | 58 | 2686 | 2701 | TGTTCCCTGGTGGTGC | 50 | 127 | 45 |
| 866378 | 51 | 66 | 2694 | 2709 | CCCCGAGATGTTCCCT | 26 | 45 | 46 |
| 866381 | 55 | 70 | 2698 | 2713 | GGCTCCCCGAGATGTT | 62 | 79 | 47 |
| 866384 | 59 | 74 | 2702 | 2717 | ACCAGGCTCCCCGAGA | 60 | 109 | 48 |
| 866386 | 63 | 78 | 2706 | 2721 | TCCAACCAGGCTCCCC | 52 | 77 | 49 |
| 866388 | 68 | 83 | 2711 | 2726 | CAGCTTCCAACCAGGC | 63 | 86 | 50 |
| 866394 | 79 | 94 | 2722 | 2737 | GACTAAGCCTGCAGCT | 78 | 101 | 51 |
| 866397 | 83 | 98 | 2726 | 2741 | GACAGACTAAGCCTGC | 76 | 96 | 52 |
| 866404 | 91 | 106 | 2734 | 2749 | CCGCAGCCGACAGACT | 74 | 98 | 53 |
| 866407 | 95 | 110 | 2738 | 2753 | AGACCCGCAGCCGACA | 45 | 110 | 54 |
| 866409 | 99 | 114 | 2742 | 2757 | TCAGAGACCCGCAGCC | 50 | 118 | 55 |
| 866417 | 131 | 146 | 2774 | 2789 | GATGTTAAGGCAAGAC | 43 | 91 | 56 |
| 866419 | 135 | 150 | 2778 | 2793 | AAGGGATGTTAAGGCA | 49 | 119 | 57 |
| 866422 | 139 | 154 | 2782 | 2797 | ATGCAAGGGATGTTAA | 71 | 80 | 58 |
| 866429 | 173 | 188 | 2816 | 2831 | ACCCCTTCTTCCAAGC | 32* | 94 | 59 |
| 866435 | 195 | 210 | N/A | N/A | TTCTGCCCGGCCAAAC | 20* | 99 | 60 |
| 866438 | 199 | 214 | N/A | N/A | GAGTTTCTGCCCGGCC | 36* | 88 | 61 |
| 866441 | 203 | 218 | N/A | N/A | AGCGGAGTTTCTGCCC | 65* | 80 | 62 |
| 866444 | N/A | N/A | 2843 | 2858 | ATAAAACTCACCCGGC | 99* | 106 | 63 |
| 866448 | N/A | N/A | 2858 | 2873 | AGGCACAGTTTGCCAA | 102 | 93 | 64 |
| 866452 | N/A | N/A | 2883 | 2898 | TAAAGCATAGGCACAC | 52 | 82 | 65 |
| 866456 | N/A | N/A | 2895 | 2910 | AGGCAATTCTTGTAAA | 51 | 97 | 66 |
| 866460 | N/A | N/A | 2967 | 2982 | GTCAATTCCAACACAA | 32 | 99 | 67 |
| 866464 | N/A | N/A | 2995 | 3010 | AGGATATAAAAAGCCC | 62 | 113 | 68 |
| 866468 | N/A | N/A | 3080 | 3095 | TTCAATCTGGATGCAT | 49 | 99 | 69 |
| 866472 | N/A | N/A | 3160 | 3175 | TGCTTACCAAGGCCAC | 48 | 48 | 70 |
| 866476 | N/A | N/A | 3312 | 3327 | ACCCAACCCATCTGTC | 69 | 95 | 71 |
| 866480 | N/A | N/A | 3324 | 3339 | CCAGACAGGTAAACCC | 52 | 83 | 72 |
| 866484 | N/A | N/A | 3360 | 3375 | CAATAACCACCCAGGT | 89 | 105 | 73 |
| 866488 | N/A | N/A | 3405 | 3420 | TGCTACAGCTCGCTTC | 61 | 120 | 74 |
| 866492 | N/A | N/A | 3441 | 3456 | AGTCTAATACACATAC | 49 | 101 | 75 |
| 866496 | N/A | N/A | 3502 | 3517 | CATATCTAACTCAGGG | 36 | 85 | 76 |
| 866500 | N/A | N/A | 3526 | 3541 | AAGTAAGCACTTTAGA | 60 | 87 | 77 |
| 866504 | N/A | N/A | 3548 | 3563 | ACAACATACTCAGGAC | 25 | 89 | 78 |
| 866508 | N/A | N/A | 3560 | 3575 | ACTTATGTGATCACAA | 36 | 109 | 79 |
| 866512 | N/A | N/A | 3639 | 3654 | GGTCATTTTATAAGTT | 38 | 85 | 80 |
| 866516 | N/A | N/A | 3670 | 3685 | AAAGACATGGCAGTGT | 62 | 86 | 81 |
| 866520 | N/A | N/A | 3798 | 3813 | ACTAAAGTAGCTTGTA | 74 | 75 | 82 |
| 866524 | N/A | N/A | 3838 | 3853 | TCTCACATCAACCTTT | 58 | 117 | 83 |
| 866528 | N/A | N/A | 3893 | 3908 | CATAATAAGGGCCCAG | 94 | 93 | 84 |
| 866532 | N/A | N/A | 3978 | 3993 | AGGAAATAGTAATGCC | 30 | 92 | 85 |
| 866536 | N/A | N/A | 4030 | 4045 | GAATTTGGGCAATTTC | 67 | 111 | 86 |
| 866540 | N/A | N/A | 4111 | 4126 | GTGAGAGGCAGTATGG | 32 | 90 | 87 |
| 866544 | N/A | N/A | 4236 | 4251 | CTTCAAACAATGATCT | 50 | 99 | 88 |
| 866548 | N/A | N/A | 4273 | 4288 | TATTCTTACGGTAAGT | 47 | 120 | 89 |
| 866552 | N/A | N/A | 4296 | 4311 | AGCTGCTATTTTAGCT | 93 | 100 | 90 |
| 866556 | N/A | N/A | 4358 | 4373 | TCATAGAAGCTCATCA | 71 | 87 | 91 |
| 866560 | N/A | N/A | 4464 | 4479 | GAGCAGGAATGTGGAT | 78 | 97 | 92 |
| 866564 | N/A | N/A | 4541 | 4556 | CCCTTCAGTCTCGGCT | 82 | 88 | 93 |
| 866568 | N/A | N/A | 4645 | 4660 | GTGCGAGGTGGCCATT | 66 | 117 | 94 |
| 866572 | N/A | N/A | 4733 | 4748 | GAATAAGCTCTAGGCA | 61 | 84 | 95 |
| 866576 | N/A | N/A | 4752 | 4767 | GCAAAACCAGACTACC | 49 | 89 | 96 |
| 866580 | N/A | N/A | 4814 | 4829 | GGAAGAAAAGTCCGGC | 46 | 106 | 97 |
| 866584 | N/A | N/A | 4868 | 4883 | TTCCTAGGATTGGCGG | 71 | 96 | 98 |
| 866588 | N/A | N/A | 4890 | 4905 | TGCACCTACGAAGCAT | 95 | 95 | 99 |
| 866592 | N/A | N/A | 4990 | 5005 | CTGGAAGAAGTCCCTC | 82 | 98 | 100 |
| 866596 | N/A | N/A | 5103 | 5118 | AGCTCAGCGGATGCCC | 65 | 80 | 101 |
| 866600 | N/A | N/A | 5212 | 5227 | GGCTGAGCTTTCTCAC | 52 | 82 | 102 |
| 866604 | N/A | N/A | 5233 | 5248 | CTTTTACTCGAAACCA | 68 | 93 | 103 |
| 866608 | N/A | N/A | 5249 | 5264 | TGCAAAACCGCGGCGA | 78 | 98 | 104 |
| 866612 | N/A | N/A | 5266 | 5281 | AAGAAAAAGTCGGTCC | 75 | 94 | 105 |
| 866616 | N/A | N/A | 5279 | 5294 | TTAAATGCGCCTCAAG | 88 | 101 | 106 |
| 866620 | N/A | N/A | 5299 | 5314 | CAGGAGACAGTCACTT | 53 | 77 | 107 |

TABLE 11
Percent control of human PMP22 RNA with 3-10-3 cEt gapmers

| | SEQ | SEQ | | | | | | |
|---|---|---|---|---|---|---|---|---|
| | ID | ID | SEQ | SEQ | | PMP22 | PMP22 | |
| | NO: | NO: | ID | ID | | (% | (% | |
| | 1 | 1 | NO: 2 | NO: 2 | | UTC) | UTC) | SEQ |
| Compound | Start | Stop | Start | Stop | | RTS | RTS | ID |
| ID | Site | Site | Site | Site | Sequence (5′ to 3′) | 35670 | 35667 | NO |
| 684112 | 23 | 38 | 2666 | 2681 | TGTAACTGAAGCCAGA | 63 | 86 | 108 |
| 684115 | 31 | 46 | 2674 | 2689 | GTGCTCCCTGTAACTG | 41 | 126 | 109 |
| 684120 | 57 | 72 | 2700 | 2715 | CAGGCTCCCCGAGATG | 70 | 78 | 110 |
| 684129 | 93 | 108 | 2736 | 2751 | ACCCGCAGCCGACAGA | 44 | 65 | 111 |
| 684130 | 97 | 112 | 2740 | 2755 | AGAGACCCGCAGCCGA | 37 | 108 | 112 |
| 684132 | 101 | 116 | 2744 | 2759 | AGTCAGAGACCCGCAG | 66 | 101 | 113 |
| 684137 | 133 | 148 | 2776 | 2791 | GGGATGTTAAGGCAAG | 58 | 83 | 114 |
| 684139 | 141 | 156 | 2784 | 2799 | AAATGCAAGGGATGTT | 43 | 61 | 115 |
| | | | 16186 | 16201 | | | | |
| 684144 | 166 | 181 | 2809 | 2824 | CTTCCAAGCAGATTTC | 78* | 114 | 116 |
| 684149 | 201 | 216 | N/A | N/A | CGGAGTTTCTGCCCGG | 57* | 98 | 117 |
| 684277 | 905 | 920 | 37268 | 37283 | AGTGTTATAAATAGGT | 26 | 35 | 40 |
| 718270 | 27 | 42 | 2670 | 2685 | TCCCTGTAACTGAAGC | 70 | 75 | 118 |
| 866358 | 17 | 32 | 2660 | 2675 | TGAAGCCAGACCAGGC | 128 | 117 | 119 |
| 866366 | 35 | 50 | 2678 | 2693 | GGTGGTGCTCCCTGTA | 54 | 123 | 120 |
| 866369 | 40 | 55 | 2683 | 2698 | TCCCTGGTGGTGCTCC | 40 | 59 | 121 |
| 866373 | 45 | 60 | 2688 | 2703 | GATGTTCCCTGGTGGT | 42 | 89 | 122 |
| 866376 | 49 | 64 | 2692 | 2707 | CCGAGATGTTCCCTGG | 29 | 76 | 123 |
| 866379 | 53 | 68 | 2696 | 2711 | CTCCCCGAGATGTTCC | 34 | 42 | 124 |
| 866385 | 61 | 76 | 2704 | 2719 | CAACCAGGCTCCCCGA | 58 | 96 | 125 |
| 866387 | 66 | 81 | 2709 | 2724 | GCTTCCAACCAGGCTC | 75 | 108 | 126 |
| 866390 | 70 | 85 | 2713 | 2728 | TGCAGCTTCCAACCAG | 74 | 98 | 127 |
| 866393 | 77 | 92 | 2720 | 2735 | CTAAGCCTGCAGCTTC | 92 | 105 | 128 |
| 866396 | 81 | 96 | 2724 | 2739 | CAGACTAAGCCTGCAG | 83 | 100 | 129 |
| 866399 | 85 | 100 | 2728 | 2743 | CCGACAGACTAAGCCT | 43 | 84 | 130 |
| 866402 | 89 | 104 | 2732 | 2747 | GCAGCCGACAGACTAA | 39 | 95 | 131 |
| 866413 | 105 | 120 | 2748 | 2763 | GGGCAGTCAGAGACCC | 73 | 82 | 132 |
| 866415 | 129 | 144 | 2772 | 2787 | TGTTAAGGCAAGACCC | 60 | 76 | 133 |
| 866421 | 137 | 152 | 2780 | 2795 | GCAAGGGATGTTAAGG | 34 | 75 | 134 |
| 866424 | 142 | 157 | 2785 | 2800 | CAAATGCAAGGGATGT | 42 | 68 | 135 |
| 866427 | 146 | 161 | 2789 | 2804 | CAGCCAAATGCAAGGG | 29 | 112 | 136 |
| 866430 | 176 | 191 | 2819 | 2834 | GTAACCCCTTCTTCCA | 18* | 80 | 137 |
| 866433 | 193 | 208 | N/A | N/A | CTGCCCGGCCAAACAG | 24* | 100 | 138 |
| 866436 | 197 | 212 | N/A | N/A | GTTTCTGCCCGGCCAA | 15* | 111 | 139 |
| 866446 | N/A | N/A | 2847 | 2862 | GCCAATAAAACTCACC | 77 | 89 | 140 |
| 866450 | N/A | N/A | 2868 | 2883 | CATCACCCAGAGGCAC | 73 | 97 | 141 |
| 866454 | N/A | N/A | 2886 | 2901 | TTGTAAAGCATAGGCA | 34 | 104 | 142 |
| 866458 | N/A | N/A | 2926 | 2941 | TTCATTTGCGGCTTGC | 29 | 82 | 143 |
| 866462 | N/A | N/A | 2991 | 3006 | TATAAAAAGCCCTCTG | 77 | 88 | 144 |
| 866466 | N/A | N/A | 3067 | 3082 | CATTAGGGTTTCTAGA | 62 | 94 | 145 |
| 866470 | N/A | N/A | 3131 | 3146 | GTGCACAGCTATTTTC | 110 | 136 | 146 |
| 866474 | N/A | N/A | 3229 | 3244 | GACCAGGCTTGCCACA | 65 | 96 | 147 |
| 866478 | N/A | N/A | 3317 | 3332 | GGTAAACCCAACCCAT | 88 | 97 | 148 |
| 866482 | N/A | N/A | 3334 | 3349 | CCATATACTGCCAGAC | 40 | 91 | 149 |
| 866486 | N/A | N/A | 3366 | 3381 | TTTAATCAATAACCAC | 76 | 94 | 150 |
| 866490 | N/A | N/A | 3417 | 3432 | GCATATATTGGGTGCT | 49 | 84 | 151 |
| 866494 | N/A | N/A | 3500 | 3515 | TATCTAACTCAGGGTT | 57 | 76 | 152 |
| 866498 | N/A | N/A | 3509 | 3524 | ATATGAGCATATCTAA | 66 | 78 | 153 |
| 866502 | N/A | N/A | 3538 | 3553 | CAGGACTGTTCTAAGT | 41 | 87 | 154 |
| 866506 | N/A | N/A | 3550 | 3565 | TCACAACATACTCAGG | 30 | 98 | 155 |
| 866510 | N/A | N/A | 3564 | 3579 | CAACACTTATGTGATC | 35 | 88 | 156 |
| 866514 | N/A | N/A | 3646 | 3661 | CTCCACAGGTCATTTT | 63 | 88 | 157 |
| 866518 | N/A | N/A | 3696 | 3711 | GCATATGCAAGTAGAA | 63 | 106 | 158 |
| 866522 | N/A | N/A | 3820 | 3835 | GGGAAGACCTGACCAC | 45 | 91 | 159 |
| 866526 | N/A | N/A | 3876 | 3891 | GCCCAAATTGCCACCA | 78 | 99 | 160 |
| 866530 | N/A | N/A | 3919 | 3934 | CAAAGCAGTTAACATC | 41 | 95 | 161 |
| 866534 | N/A | N/A | 4015 | 4030 | CTCAAGTTCACTGAGC | 49 | 97 | 162 |
| 866538 | N/A | N/A | 4063 | 4078 | AACAAACCTAATCACC | 64 | 98 | 163 |
| 866542 | N/A | N/A | 4183 | 4198 | TACTTGTAAACACTGC | 18 | 89 | 164 |
| 866546 | N/A | N/A | 4270 | 4285 | TCTTACGGTAAGTAAA | 60 | 89 | 165 |
| 866550 | N/A | N/A | 4292 | 4307 | GCTATTTTAGCTAATT | 62 | 114 | 166 |
| 866554 | N/A | N/A | 4316 | 4331 | TTATTTTACGATTTGA | 59 | 93 | 167 |
| 866558 | N/A | N/A | 4360 | 4375 | TGTCATAGAAGCTCAT | 29 | 84 | 168 |
| 866562 | N/A | N/A | 4508 | 4523 | ACTGAGACTCCCGTGC | 83 | 84 | 169 |
| 866566 | N/A | N/A | 4564 | 4579 | CGTTACAGGGAGAGAG | 62 | 69 | 170 |
| 866570 | N/A | N/A | 4721 | 4736 | GGCAAAGTGTTCCTGC | 58 | 88 | 171 |
| 866574 | N/A | N/A | 4745 | 4760 | CAGACTACCACCGAAT | 57 | 88 | 172 |
| 866578 | N/A | N/A | 4790 | 4805 | GGATAGCATGGTCTGG | 25 | 92 | 173 |
| 866582 | N/A | N/A | 4850 | 4865 | ATTGATCTAGCGGGCT | 50 | 103 | 174 |
| 866586 | N/A | N/A | 4883 | 4898 | ACGAAGCATGCCAGCT | 61 | 81 | 175 |
| 866590 | N/A | N/A | 4933 | 4948 | AGCCGGACACACCTGC | 60 | 102 | 176 |
| 866594 | N/A | N/A | 5062 | 5077 | CGCCGACCGCGCCCGC | 68 | 126 | 177 |
| 866598 | N/A | N/A | 5121 | 5136 | GAAGACCCAGCCAAAT | 81 | 75 | 178 |
| 866602 | N/A | N/A | 5226 | 5241 | TCGAAACCAGAGGCGG | 56 | 87 | 179 |
| 866606 | N/A | N/A | 5244 | 5259 | AACCGCGGCGACTTTT | 65 | 92 | 180 |
| 866610 | N/A | N/A | 5263 | 5278 | AAAAAGTCGGTCCCTG | 64 | 93 | 181 |
| 866614 | N/A | N/A | 5268 | 5283 | TCAAGAAAAAGTCGGT | 59 | 88 | 182 |
| 866618 | N/A | N/A | 5291 | 5306 | AGTCACTTGGCCTTAA | 48 | 101 | 183 |
| 866622 | N/A | N/A | 5379 | 5394 | CTGCAGTAGGGTGTGT | 80 | 102 | 184 |

TABLE 12
Percent control of human PMP22 RNA with 3-10-3 cEt gapmers

| | SEQ | SEQ | | | | | | |
|---|---|---|---|---|---|---|---|---|
| | ID | ID | SEQ | SEQ | | PMP22 | PMP22 | |
| | NO: | NO: | ID | ID | | (% | (% | |
| | 1 | 1 | NO: 2 | NO: 2 | | UTC) | UTC) | SEQ |
| Compound | Start | Stop | Start | Stop | | RTS | RTS | ID |
| ID | Site | Site | Site | Site | Sequence (5′ to 3′) | 35670 | 35667 | NO |
| 684110 | 20 | 35 | 2663 | 2678 | AACTGAAGCCAGACCA | 124 | 117 | 185 |
| 684114 | 28 | 43 | 2671 | 2686 | CTCCCTGTAACTGAAG | 76 | 64 | 186 |
| 684116 | 37 | 52 | 2680 | 2695 | CTGGTGGTGCTCCCTG | 63 | 110 | 187 |
| 684122 | 62 | 77 | 2705 | 2720 | CCAACCAGGCTCCCCG | 36 | 102 | 188 |
| 684124 | 67 | 82 | 2710 | 2725 | AGCTTCCAACCAGGCT | 102 | 99 | 189 |
| 684126 | 78 | 93 | 2721 | 2736 | ACTAAGCCTGCAGCTT | 64 | 102 | 190 |
| 684127 | 82 | 97 | 2725 | 2740 | ACAGACTAAGCCTGCA | 78 | 110 | 191 |
| 684131 | 98 | 113 | 2741 | 2756 | CAGAGACCCGCAGCCG | 39 | 108 | 192 |
| 684138 | 138 | 153 | 2781 | 2796 | TGCAAGGGATGTTAAG | 79 | 75 | 193 |
| 684145 | 169 | 184 | 2812 | 2827 | CTTCTTCCAAGCAGAT | 100* | 147 | 194 |
| 684277 | 905 | 920 | 37268 | 37283 | AGTGTTATAAATAGGT | 37 | 35 | 40 |
| 866360 | 24 | 39 | 2667 | 2682 | CTGTAACTGAAGCCAG | 97 | 103 | 195 |
| 866363 | 32 | 47 | 2675 | 2690 | GGTGCTCCCTGTAACT | 51 | 117 | 196 |
| 866370 | 41 | 56 | 2684 | 2699 | TTCCCTGGTGGTGCTC | 42 | 64 | 197 |
| 866374 | 46 | 61 | 2689 | 2704 | AGATGTTCCCTGGTGG | 59 | 142 | 198 |
| 866377 | 50 | 65 | 2693 | 2708 | CCCGAGATGTTCCCTG | 33 | 60 | 199 |
| 866380 | 54 | 69 | 2697 | 2712 | GCTCCCCGAGATGTTC | 36 | 37 | 200 |
| 866383 | 58 | 73 | 2701 | 2716 | CCAGGCTCCCCGAGAT | 57 | 89 | 201 |
| 866391 | 71 | 86 | 2714 | 2729 | CTGCAGCTTCCAACCA | 89 | 131 | 202 |
| 866400 | 86 | 101 | 2729 | 2744 | GCCGACAGACTAAGCC | 72 | 106 | 203 |
| 866403 | 90 | 105 | 2733 | 2748 | CGCAGCCGACAGACTA | 62 | 97 | 204 |
| 866406 | 94 | 109 | 2737 | 2752 | GACCCGCAGCCGACAG | 41 | 101 | 205 |
| 866411 | 102 | 117 | 2745 | 2760 | CAGTCAGAGACCCGCA | 29 | 93 | 206 |
| 866414 | 106 | 121 | 2749 | 2764 | AGGGCAGTCAGAGACC | 78 | 93 | 207 |
| 866416 | 130 | 145 | 2773 | 2788 | ATGTTAAGGCAAGACC | 75 | 124 | 208 |
| 866418 | 134 | 149 | 2777 | 2792 | AGGGATGTTAAGGCAA | 64 | 109 | 209 |
| 866425 | 143 | 158 | 2786 | 2801 | CCAAATGCAAGGGATG | 64 | 77 | 210 |
| 866428 | 147 | 162 | 2790 | 2805 | GCAGCCAAATGCAAGG | 70 | 161 | 211 |
| 866431 | 177 | 192 | 2820 | 2835 | CGTAACCCCTTCTTCC | 10* | 132 | 212 |
| 866434 | 194 | 209 | N/A | N/A | TCTGCCCGGCCAAACA | 9* | 93 | 213 |
| 866437 | 198 | 213 | N/A | N/A | AGTTTCTGCCCGGCCA | 24* | 120 | 214 |
| 866440 | 202 | 217 | N/A | N/A | GCGGAGTTTCTGCCCG | 84* | 86 | 215 |
| 866443 | N/A | N/A | 2842 | 2857 | TAAAACTCACCCGGCC | 83* | 101 | 216 |
| 866447 | N/A | N/A | 2848 | 2863 | TGCCAATAAAACTCAC | 83 | 100 | 217 |
| 866451 | N/A | N/A | 2871 | 2886 | ACACATCACCCAGAGG | 60 | 89 | 218 |
| 866455 | N/A | N/A | 2894 | 2909 | GGCAATTCTTGTAAAG | 64 | 115 | 219 |
| 866459 | N/A | N/A | 2929 | 2944 | CTTTTCATTTGCGGCT | 80 | 118 | 220 |
| 866463 | N/A | N/A | 2994 | 3009 | GGATATAAAAAGCCCT | 72 | 88 | 221 |
| 866467 | N/A | N/A | 3068 | 3083 | GCATTAGGGTTTCTAG | 58 | 113 | 222 |
| 866471 | N/A | N/A | 3159 | 3174 | GCTTACCAAGGCCACC | 53 | 85 | 223 |
| 866475 | N/A | N/A | 3254 | 3269 | GAGGAAGTGCTACTCA | 76 | 89 | 224 |
| 866479 | N/A | N/A | 3322 | 3337 | AGACAGGTAAACCCAA | 72 | 93 | 225 |
| 866483 | N/A | N/A | 3339 | 3354 | CCACACCATATACTGC | 73 | 100 | 226 |
| 866487 | N/A | N/A | 3368 | 3383 | AGTTTAATCAATAACC | 67 | 105 | 227 |
| 866491 | N/A | N/A | 3419 | 3434 | GTGCATATATTGGGTG | 51 | 100 | 228 |
| 866495 | N/A | N/A | 3501 | 3516 | ATATCTAACTCAGGGT | 45 | 107 | 229 |
| 866499 | N/A | N/A | 3512 | 3527 | GAAATATGAGCATATC | 60 | 110 | 230 |
| 866503 | N/A | N/A | 3547 | 3562 | CAACATACTCAGGACT | 51 | 98 | 231 |
| 866507 | N/A | N/A | 3552 | 3567 | GATCACAACATACTCA | 19 | 101 | 232 |
| 866511 | N/A | N/A | 3567 | 3582 | AACCAACACTTATGTG | 57 | 97 | 233 |
| 866515 | N/A | N/A | 3668 | 3683 | AGACATGGCAGTGTTT | 70 | 127 | 234 |
| 866519 | N/A | N/A | 3796 | 3811 | TAAAGTAGCTTGTAAC | 85 | 102 | 235 |
| 866523 | N/A | N/A | 3821 | 3836 | AGGGAAGACCTGACCA | 64 | 107 | 236 |
| 866527 | N/A | N/A | 3892 | 3907 | ATAATAAGGGCCCAGT | 113 | 123 | 237 |
| 866531 | N/A | N/A | 3961 | 3976 | GCTTTAAAGGTTTATG | 47 | 93 | 238 |
| 866535 | N/A | N/A | 4024 | 4039 | GGGCAATTTCTCAAGT | 73 | 112 | 239 |
| 866539 | N/A | N/A | 4096 | 4111 | GTGCAGTGGTTAGGCA | 73 | 90 | 240 |
| 866543 | N/A | N/A | 4192 | 4207 | AATGAAGTGTACTTGT | 38 | 105 | 241 |
| 866547 | N/A | N/A | 4271 | 4286 | TTCTTACGGTAAGTAA | 53 | 112 | 242 |
| 866551 | N/A | N/A | 4293 | 4308 | TGCTATTTTAGCTAAT | 89 | 103 | 243 |
| 866555 | N/A | N/A | 4355 | 4370 | TAGAAGCTCATCACTC | 62 | 109 | 244 |
| 866559 | N/A | N/A | 4424 | 4439 | CAGCAGTTCACGCACG | 62 | 97 | 245 |
| 866563 | N/A | N/A | 4525 | 4540 | TGGCAGAGGCGCGCCC | 127 | 117 | 246 |
| 866567 | N/A | N/A | 4603 | 4618 | AATCAGCTGATTCATA | 101 | 101 | 247 |
| 866571 | N/A | N/A | 4726 | 4741 | CTCTAGGCAAAGTGTT | 81 | 105 | 248 |
| 866575 | N/A | N/A | 4751 | 4766 | CAAAACCAGACTACCA | 74 | 91 | 249 |
| 866579 | N/A | N/A | 4813 | 4828 | GAAGAAAAGTCCGGCC | 88 | 99 | 250 |
| 866583 | N/A | N/A | 4867 | 4882 | TCCTAGGATTGGCGGG | 89 | 122 | 251 |
| 866587 | N/A | N/A | 4888 | 4903 | CACCTACGAAGCATGC | 69 | 102 | 252 |
| 866591 | N/A | N/A | 4987 | 5002 | GAAGAAGTCCCTCTCC | 77 | 128 | 253 |
| 866595 | N/A | N/A | 5076 | 5091 | TCTGGGCCCGCCGACG | 91 | 117 | 254 |
| 866599 | N/A | N/A | 5150 | 5165 | CGAGAAACTGGCTCCT | 68 | 115 | 255 |
| 866603 | N/A | N/A | 5232 | 5247 | TTTTACTCGAAACCAG | 83 | 110 | 256 |
| 866607 | N/A | N/A | 5248 | 5263 | GCAAAACCGCGGCGAC | 65 | 95 | 257 |
| 866611 | N/A | N/A | 5265 | 5280 | AGAAAAAGTCGGTCCC | 83 | 102 | 258 |
| 866615 | N/A | N/A | 5269 | 5284 | CTCAAGAAAAAGTCGG | 60 | 95 | 259 |
| 866619 | N/A | N/A | 5297 | 5312 | GGAGACAGTCACTTGG | 31 | 85 | 260 |
| 866623 | N/A | N/A | 5411 | 5426 | CCTTTAACGGGAACAA | 113 | 108 | 261 |

TABLE 13
Percent control of human PMP22 RNA with 3-10-3 cEt gapmers

| | SEQ | SEQ | SEQ | SEQ | | | | |
|---|---|---|---|---|---|---|---|---|
| | ID | ID | ID | ID | | | | |
| | NO: | NO: | NO: | NO: | | PMP22 | PMP22 | |
| | 1 | 1 | 2 | 2 | | (% UTC) | (% UTC) | SEQ |
| Compound | Start | Stop | Start | Stop | | RTS | RTS | ID |
| ID | Site | Site | Site | Site | Sequence (5′ to 3′) | 35670 | 35667 | NO |
| 684394 | 1489 | 1504 | 37852 | 37867 | ATTATTCAGGTCTCCA | 16 | 27 | 31 |
| 885424 | 205 | 220 | 7240 | 7255 | TCAGCGGAGTTTCTGC | 40* | 32 | 4812 |
| 885444 | 232 | 247 | 7267 | 7282 | GAGGAGCATTCTGGCG | 20* | 14 | 4813 |
| 885464 | 314 | 329 | N/A | N/A | CCACGATCCATTGGCT | 62 | 42 | 4814 |
| 885484 | 447 | 462 | 28420 | 28435 | AAGATGATCGACAGGA | 67 | 61 | 4815 |
| 885503 | 575 | 590 | 36938 | 36953 | TGTAGATGGCCGCAGC | 55 | 71 | 4816 |
| 885522 | 602 | 617 | 36965 | 36980 | TGAGATGCCACTCCGG | 67 | 64 | 268 |
| 885542 | 676 | 691 | 37039 | 37054 | GACACCGCTGAGAAGG | 54 | 49 | 269 |
| 885562 | 799 | 814 | 37162 | 37177 | TTGGGCTAGCTCTTTT | 59 | 49 | 270 |
| 885582 | 966 | 981 | 37329 | 37344 | CTCAACACGAGGCTGA | 65 | 72 | 271 |
| 885602 | 1016 | 1031 | 37379 | 37394 | AGCTGGATTATACTGT | 50 | 68 | 272 |
| 885622 | 1139 | 1154 | 37502 | 37517 | TTCTAAATGAGGTGGA | 34 | 44 | 273 |
| 885642 | 1224 | 1239 | 37587 | 37602 | GCAGCGGCTGTTTCTG | 53 | 54 | 274 |
| 885662 | 1294 | 1309 | 37657 | 37672 | CGTGTTTTTGCAAGGG | 36 | 43 | 275 |
| 885682 | 1329 | 1344 | 37692 | 37707 | CCACCTGTAAGGGCAA | 37 | 50 | 276 |
| 885702 | 1377 | 1392 | 37740 | 37755 | AAGACTTGTTGTCACT | 18 | 24 | 277 |
| 885719 | 1531 | 1546 | 37894 | 37909 | GCTAGGTACAAAAGCA | 77 | 76 | 278 |
| 885739 | 1609 | 1624 | 37972 | 37987 | TGATGCTCCGACCGTA | 65 | 65 | 279 |
| 885759 | 1670 | 1685 | 38033 | 38048 | ACAGCCTAGACCCAGC | 36 | 60 | 280 |
| 885778 | 1749 | 1764 | 38112 | 38127 | GCATCAGAAGGGCACC | 36 | 35 | 281 |
| 885797 | N/A | N/A | 5499 | 5514 | GTTGGCTCCGCTGCTG | 44 | 61 | 282 |
| 885837 | N/A | N/A | 7182 | 7197 | GAGCGACGGAGGCGCG | 74 | 76 | 283 |
| 885857 | N/A | N/A | 7227 | 7242 | TGCCTGCGAGGAGAGC | 124* | 129 | 284 |
| 885897 | N/A | N/A | 32737 | 32752 | AATCCCGGTAACCACA | 46 | 46 | 285 |
| 885917 | N/A | N/A | 33016 | 33031 | AGGCACCCCACTAATT | 86 | 93 | 286 |
| 885937 | N/A | N/A | 3414 | 3429 | TATATTGGGTGCTACA | 39 | 119 | 287 |
| 885957 | N/A | N/A | 4494 | 4509 | GCGCAGGCCAGCCTTG | 106 | 165 | 288 |
| 885977 | N/A | N/A | 5061 | 5076 | GCCGACCGCGCCCGCG | 94 | 131 | 289 |
| 885994 | N/A | N/A | 5805 | 5820 | CGCTATCCAGACACCA | 24 | 25 | 290 |
| 886014 | N/A | N/A | 6318 | 6333 | GAGTAGATGTCCAGCG | 60 | 70 | 291 |
| 886034 | N/A | N/A | 6835 | 6850 | CTCCGAGACCCCGGTT | 65 | 68 | 292 |
| 886054 | N/A | N/A | 7663 | 7678 | CTTCAACGAGGCTGCA | 53 | 65 | 293 |
| 886074 | N/A | N/A | 8553 | 8568 | ACTCAACCTTAGACAC | 74 | 88 | 294 |
| 886094 | N/A | N/A | 9129 | 9144 | GCACTAAGGGCATGTC | 42 | 45 | 295 |
| 886114 | N/A | N/A | 9599 | 9614 | GGTACCTAGTTGGTGC | 80 | 86 | 296 |
| 886134 | N/A | N/A | 10056 | 10071 | TATAATGCTTCAGCTG | 49 | 46 | 297 |
| 886154 | N/A | N/A | 10658 | 10673 | CAACTTAGCAACTCCT | 48 | 51 | 298 |
| 886174 | N/A | N/A | 11135 | 11150 | CGCCACTTAAGGCTGA | 79 | 91 | 299 |
| 886194 | N/A | N/A | 11861 | 11876 | GTCAAAGTCAGTTAGT | 35 | 40 | 300 |
| 886214 | N/A | N/A | 12330 | 12345 | AACCAGAACACTAGCC | 49 | 70 | 301 |
| 886234 | N/A | N/A | 12974 | 12989 | AGAGAAGCCTCAACAG | 74 | 83 | 302 |
| 886254 | N/A | N/A | 13879 | 13894 | ACTTAACAGAAGCAGG | 35 | 53 | 303 |
| 886274 | N/A | N/A | 14287 | 14302 | AACTACGCCAAGCTCC | 48 | 72 | 304 |
| 886294 | N/A | N/A | 14943 | 14958 | CATTCAATAGCAGGGC | 27 | 33 | 305 |
| 886313 | N/A | N/A | 15900 | 15915 | GCTGAGGGAGCCACGA | 48 | 58 | 306 |
| 886333 | N/A | N/A | 16541 | 16556 | GGCTCAATAGAGTTGA | 67 | 66 | 307 |
| 886353 | N/A | N/A | 17330 | 17345 | CCCTAACTCCCTACAT | 87 | 88 | 308 |
| 886373 | N/A | N/A | 18266 | 18281 | CGTCAACTGTTTGAAG | 36 | 51 | 309 |
| 886393 | N/A | N/A | 18755 | 18770 | CTCGATGCCACAATTA | 88 | 94 | 310 |
| 886413 | N/A | N/A | 19267 | 19282 | GTGCATTGTACGATGA | 32 | 44 | 311 |
| 886432 | N/A | N/A | 19678 | 19693 | GGGTATTTTAGCTAGA | 52 | 47 | 312 |
| 886452 | N/A | N/A | 20052 | 20067 | CCCAAGACCAGGACTC | 87 | 80 | 313 |
| 886472 | N/A | N/A | 21247 | 21262 | AGCCAATATCCAACCT | 61 | 52 | 314 |
| 886492 | N/A | N/A | 21714 | 21729 | TGCCTTTGTATCACAA | 34 | 47 | 315 |
| 886511 | N/A | N/A | 22709 | 22724 | GGTAACAACCAGCGCA | 40 | 52 | 316 |
| 886531 | N/A | N/A | 23308 | 23323 | ACACAACATGTCATCA | 59 | 67 | 317 |
| 886551 | N/A | N/A | 24434 | 24449 | AGATACCACCTACCAG | 44 | 56 | 318 |
| 886571 | N/A | N/A | 25440 | 25455 | ATAACATGGCCTGAAA | 73 | 72 | 319 |
| 886591 | N/A | N/A | 26705 | 26720 | AGCATAGAGGTTCTTC | 42 | 41 | 320 |
| 886611 | N/A | N/A | 27023 | 27038 | TCCTAGATTTTCACCT | 55 | 62 | 321 |
| 886631 | N/A | N/A | 27693 | 27708 | CGGGAATGGCTGTTAG | 55 | 59 | 322 |
| 886651 | N/A | N/A | 28712 | 28727 | TTCTAAGTCCCAAGTT | 82 | 100 | 323 |
| 886671 | N/A | N/A | 29157 | 29172 | TTAAGGAGACCTCTCA | 22 | 18 | 324 |
| 886691 | N/A | N/A | 29580 | 29595 | TACCATGGGCATTCTG | 75 | 75 | 325 |
| 886711 | N/A | N/A | 30174 | 30189 | AACAAGGTTTGAGCGA | 34 | 35 | 326 |
| 886731 | N/A | N/A | 30918 | 30933 | GGACAAAGTCATGCGC | 39 | 35 | 327 |
| 886751 | N/A | N/A | 31283 | 31298 | TACTAGTCTGTGAGTC | 46 | 44 | 328 |
| 886771 | N/A | N/A | 31777 | 31792 | AGCCTTGTGGCTAAGT | 93 | 85 | 329 |
| 886791 | N/A | N/A | 32576 | 32591 | TCCTTTTAGGTCTGTG | 25 | 24 | 330 |
| 886811 | N/A | N/A | 33522 | 33537 | CTATGATGTTGGGTTG | 59 | 69 | 331 |
| 886831 | N/A | N/A | 34101 | 34116 | GCTCACTAAGGGTCAG | 65 | 73 | 332 |
| 886851 | N/A | N/A | 34482 | 34497 | CCCCATGAGAGTGATT | 69 | 82 | 333 |
| 886871 | N/A | N/A | 35061 | 35076 | CTTAACCGTGATAAGC | 54 | 62 | 334 |
| 886891 | N/A | N/A | 35499 | 35514 | GTCCAGGATCCTTAAT | 56 | 46 | 335 |
| 886911 | N/A | N/A | 35903 | 35918 | TGCCGTGTGGGATTCA | 58 | 54 | 336 |
| 886931 | N/A | N/A | 36448 | 36463 | CGCCATGGTAAAAGGA | 75 | 85 | 337 |

TABLE 14
Percent control of human PMP22 RNA with 3-10-3 cEt gapmers

| | SEQ | SEQ | SEQ | SEQ | | PMP22 | |
|---|---|---|---|---|---|---|---|
| | ID | ID | ID | ID | | (% | |
| | NO: 1 | NO: 1 | NO: 2 | NO: 2 | | UTC) | SEQ |
| Compound | Start | Stop | Start | Stop | | RTS | ID |
| ID | Site | Site | Site | Site | Sequence (5′ to 3′) | 35670 | NO |
| 684394 | 1489 | 1504 | 37852 | 37867 | ATTATTCAGGTCTCCA | 12 | 31 |
| 885425 | 207 | 222 | 7242 | 7257 | GCTCAGCGGAGTTTCT | 40* | 338 |
| 885445 | 233 | 248 | 7268 | 7283 | GGAGGAGCATTCTGGC | 23* | 339 |
| 885465 | 315 | 330 | N/A | N/A | CCCACGATCCATTGGC | 58 | 340 |
| 885485 | 449 | 464 | 28422 | 28437 | TGAAGATGATCGACAG | 72 | 341 |
| 885504 | 576 | 591 | 36939 | 36954 | GTGTAGATGGCCGCAG | 68 | 342 |
| 885523 | 603 | 618 | 36966 | 36981 | TTGAGATGCCACTCCG | 77 | 343 |
| 885543 | 677 | 692 | 37040 | 37055 | TGACACCGCTGAGAAG | 56 | 344 |
| 885563 | 803 | 818 | 37166 | 37181 | GATTTTGGGCTAGCTC | 28 | 345 |
| 885583 | 968 | 983 | 37331 | 37346 | GGCTCAACACGAGGCT | 33 | 346 |
| 885603 | 1017 | 1032 | 37380 | 37395 | GAGCTGGATTATACTG | 41 | 347 |
| 885623 | 1154 | 1169 | 37517 | 37532 | ACCCACACTTTGGTTT | 76 | 348 |
| 885643 | 1226 | 1241 | 37589 | 37604 | GGGCAGCGGCTGTTTC | 36 | 349 |
| 885663 | 1295 | 1310 | 37658 | 37673 | CCGTGTTTTTGCAAGG | 45 | 350 |
| 885683 | 1330 | 1345 | 37693 | 37708 | TCCACCTGTAAGGGCA | 33 | 351 |
| 885703 | 1378 | 1393 | 37741 | 37756 | AAAGACTTGTTGTCAC | 35 | 352 |
| 885720 | 1533 | 1548 | 37896 | 37911 | TAGCTAGGTACAAAAG | 75 | 353 |
| 885740 | 1611 | 1626 | 37974 | 37989 | TCTGATGCTCCGACCG | 42 | 354 |
| 885760 | 1672 | 1687 | 38035 | 38050 | GAACAGCCTAGACCCA | 58 | 355 |
| 885779 | 1752 | 1767 | 38115 | 38130 | TTAGCATCAGAAGGGC | 32 | 356 |
| 885798 | N/A | N/A | 5515 | 5530 | ACACAAACTCGGGTGC | 56 | 357 |
| 885818 | N/A | N/A | N/A | N/A | GAGTTTCCGGCCAAAC | 110 | 358 |
| 885838 | N/A | N/A | 7183 | 7198 | CGAGCGACGGAGGCGC | 32 | 359 |
| 885858 | N/A | N/A | 7228 | 7243 | CTGCCTGCGAGGAGAG | 88* | 360 |
| 885878 | N/A | N/A | 8807 | 8822 | GCCCACGATCCATTGC | 63 | 361 |
| 885898 | N/A | N/A | 32738 | 32753 | TAATCCCGGTAACCAC | 31 | 362 |
| 885918 | N/A | N/A | 33018 | 33033 | CAAGGCACCCCACTAA | 73 | 363 |
| 885938 | N/A | N/A | 3503 | 3518 | GCATATCTAACTCAGG | 28 | 364 |
| 885958 | N/A | N/A | 4513 | 4528 | GCCCAACTGAGACTCC | 67 | 365 |
| 885978 | N/A | N/A | 5107 | 5122 | ATGTAGCTCAGCGGAT | 45 | 366 |
| 885995 | N/A | N/A | 5813 | 5828 | CCCTTATCCGCTATCC | 31 | 367 |
| 886015 | N/A | N/A | 6330 | 6345 | CTGGACCGAAGGGAGT | 54 | 368 |
| 886035 | N/A | N/A | 6904 | 6919 | GGCCACTGCACGCTTC | 78 | 369 |
| 886055 | N/A | N/A | 7680 | 7695 | TCATAAATACTCCTCT | 55 | 370 |
| 886075 | N/A | N/A | 8574 | 8589 | CTATAGTAGAAGGAGC | 40 | 371 |
| 886095 | N/A | N/A | 9136 | 9151 | CAGGAGGGCACTAAGG | 88 | 372 |
| 886115 | N/A | N/A | 9686 | 9701 | AAACAGCTCATCCTGT | 59 | 373 |
| 886135 | N/A | N/A | 10083 | 10098 | TTGTACTGTGGTTCAA | 25 | 374 |
| 886155 | N/A | N/A | 10668 | 10683 | GGTTTAAGCACAACTT | 42 | 375 |
| 886175 | N/A | N/A | 11146 | 11161 | CCTGGAGGATTCGCCA | 48 | 376 |
| 886195 | N/A | N/A | 11867 | 11882 | GGCGGAGTCAAAGTCA | 44 | 377 |
| 886215 | N/A | N/A | 12339 | 12354 | CCTAATCCTAACCAGA | 106 | 378 |
| 886235 | N/A | N/A | 13006 | 13021 | CTTATACCTGGAGAGG | 58 | 379 |
| 886255 | N/A | N/A | 13885 | 13900 | GGTGAGACTTAACAGA | 48 | 380 |
| 886275 | N/A | N/A | 14345 | 14360 | TGATTCTACTTACCCC | 49 | 381 |
| 886295 | N/A | N/A | 15093 | 15108 | TCCCAAGCCGCCTGTG | 60 | 382 |
| 886314 | N/A | N/A | 15914 | 15929 | GAGATTATGGGTTGGC | 23 | 383 |
| 886334 | N/A | N/A | 16546 | 16561 | GGACAGGCTCAATAGA | 42 | 384 |
| 886354 | N/A | N/A | 17355 | 17370 | CGTAGAGTCATCTAGA | 30 | 385 |
| 886374 | N/A | N/A | 18331 | 18346 | GCTTATGCAGCTGGGA | 76 | 386 |
| 886394 | N/A | N/A | 18811 | 18826 | TGCAATTCTACCCCAT | 45 | 387 |
| 886414 | N/A | N/A | 19309 | 19324 | TGGAAGACTTACTCCA | 64 | 388 |
| 886433 | N/A | N/A | 19696 | 19711 | CTCAACAGGTAATCCT | 47 | 389 |
| 886453 | N/A | N/A | 20103 | 20118 | TATTAACACCTCCCAT | 73 | 390 |
| 886473 | N/A | N/A | 21258 | 21273 | TGGAAGTTTTAAGCCA | 62 | 391 |
| 886493 | N/A | N/A | 21747 | 21762 | GGTCATACGGTCTTCT | 31 | 392 |
| 886512 | N/A | N/A | 22719 | 22734 | GGAATAGACAGGTAAC | 46 | 393 |
| 886532 | N/A | N/A | 23321 | 23336 | GAGTAAGGTGCACACA | 104 | 394 |
| 886552 | N/A | N/A | 24544 | 24559 | GAGCAATGACAGATAA | 42 | 395 |
| 886572 | N/A | N/A | 25480 | 25495 | CATGATCTATGACTGA | 36 | 396 |
| 886592 | N/A | N/A | 26774 | 26789 | CGGCTAATGGGTTGTG | 33 | 397 |
| 886612 | N/A | N/A | 27033 | 27048 | GGTTAACTGTTCCTAG | 35 | 398 |
| 886632 | N/A | N/A | 27698 | 27713 | GATCACGGGAATGGCT | 86 | 399 |
| 886652 | N/A | N/A | 28801 | 28816 | GTTGATACGCCTGGCT | 40 | 400 |
| 886672 | N/A | N/A | 29174 | 29189 | ACAGTTTAGGCAGGAG | 44 | 401 |
| 886692 | N/A | N/A | 29586 | 29601 | AAATGGTACCATGGGC | 35 | 402 |
| 886712 | N/A | N/A | 30201 | 30216 | CATCAGATGGGTAACG | 46 | 403 |
| 886732 | N/A | N/A | 30942 | 30957 | AGCTAGATGTAAAGGG | 55 | 404 |
| 886752 | N/A | N/A | 31310 | 31325 | TACTTAGCTCTCTAAT | 77 | 405 |
| 886772 | N/A | N/A | 31799 | 31814 | GAAGAGATAGTTCCTA | 61 | 406 |
| 886792 | N/A | N/A | 32633 | 32648 | CCACATGGAGCTTGAT | 75 | 407 |
| 886812 | N/A | N/A | 33528 | 33543 | GTGCAGCTATGATGTT | 42 | 408 |
| 886832 | N/A | N/A | 34110 | 34125 | GGCTGATTAGCTCACT | 34 | 409 |
| 886852 | N/A | N/A | 34533 | 34548 | CTAAAGCCCTTTTGAA | 54 | 410 |
| 886872 | N/A | N/A | 35068 | 35083 | CTCTAAGCTTAACCGT | 48 | 411 |
| 886892 | N/A | N/A | 35542 | 35557 | CAGCAGTTTTGATCTG | 72 | 412 |
| 886912 | N/A | N/A | 35908 | 35923 | CAGTATGCCGTGTGGG | 28 | 413 |
| 886932 | N/A | N/A | 36459 | 36474 | TATTGGAGTCACGCCA | 43 | 414 |

TABLE 15
Percent control of human PMP22 RNA with 3-10-3 cEt gapmers

| | SEQ | SEQ | SEQ | SEQ | | PMP22 | |
|---|---|---|---|---|---|---|---|
| | ID | ID | ID | ID | | (% | |
| | NO: 1 | NO: 1 | NO: 2 | NO: 2 | | UTC) | SEQ |
| Compound | Start | Stop | Start | Stop | | RTS | ID |
| ID | Site | Site | Site | Site | Sequence (5′ to 3′) | 35670 | NO |
| 597060 | 1821 | 1836 | 38184 | 38199 | AATGCATCTTAGTCCA | 34 | 415 |
| 684394 | 1489 | 1504 | 37852 | 37867 | ATTATTCAGGTCTCCA | 18 | 31 |
| 885426 | 208 | 223 | 7243 | 7258 | TGCTCAGCGGAGTTTC | 38* | 416 |
| 885446 | 234 | 249 | 7269 | 7284 | AGGAGGAGCATTCTGG | 29* | 417 |
| 885466 | 317 | 332 | 8808 | 8823 | TGCCCACGATCCATTG | 66 | 418 |
| 885486 | 450 | 465 | 28423 | 28438 | CTGAAGATGATCGACA | 79 | 419 |
| 885505 | 577 | 592 | 36940 | 36955 | CGTGTAGATGGCCGCA | 89 | 420 |
| 885524 | 607 | 622 | 36970 | 36985 | CGAGTTGAGATGCCAC | 57 | 421 |
| 885544 | 684 | 699 | 37047 | 37062 | ACATAGATGACACCGC | 36 | 422 |
| 885564 | 804 | 819 | 37167 | 37182 | GGATTTTGGGCTAGCT | 31 | 423 |
| 885584 | 970 | 985 | 37333 | 37348 | AAGGCTCAACACGAGG | 48 | 424 |
| 885604 | 1019 | 1034 | 37382 | 37397 | CTGAGCTGGATTATAC | 46 | 425 |
| 885624 | 1160 | 1175 | 37523 | 37538 | GTTTCTACCCACACTT | 53 | 426 |
| 885644 | 1227 | 1242 | 37590 | 37605 | CGGGCAGCGGCTGTTT | 49 | 427 |
| 885664 | 1296 | 1311 | 37659 | 37674 | GCCGTGTTTTTGCAAG | 71 | 428 |
| 885684 | 1331 | 1346 | 37694 | 37709 | CTCCACCTGTAAGGGC | 55 | 429 |
| 885704 | 1379 | 1394 | 37742 | 37757 | CAAAGACTTGTTGTCA | 50 | 430 |
| 885721 | 1534 | 1549 | 37897 | 37912 | CTAGCTAGGTACAAAA | 75 | 431 |
| 885741 | 1613 | 1628 | 37976 | 37991 | GTTCTGATGCTCCGAC | 58 | 432 |
| 885761 | 1673 | 1688 | 38036 | 38051 | AGAACAGCCTAGACCC | 52 | 433 |
| 885799 | N/A | N/A | 5516 | 5531 | AACACAAACTCGGGTG | 58 | 434 |
| 885839 | N/A | N/A | 7184 | 7199 | CCGAGCGACGGAGGCG | 50 | 435 |
| 885859 | N/A | N/A | 7229 | 7244 | TCTGCCTGCGAGGAGA | 91* | 436 |
| 885899 | N/A | N/A | 32739 | 32754 | TTAATCCCGGTAACCA | 69 | 437 |
| 885919 | N/A | N/A | 33025 | 33040 | CGTGCTCCAAGGCACC | 95 | 438 |
| 885939 | N/A | N/A | 3545 | 3560 | ACATACTCAGGACTGT | 43 | 439 |
| 885959 | N/A | N/A | 4524 | 4539 | GGCAGAGGCGCGCCCA | 97 | 440 |
| 885979 | N/A | N/A | 5113 | 5128 | AGCCAAATGTAGCTCA | 63 | 441 |
| 885996 | N/A | N/A | 5827 | 5842 | CGAGAACTGGGCCGCC | 69 | 442 |
| 886016 | N/A | N/A | 6395 | 6410 | CCAGGACACGAACCCC | 79 | 443 |
| 886036 | N/A | N/A | 6969 | 6984 | AACAAGCGGTTCGCAC | 64 | 444 |
| 886056 | N/A | N/A | 7707 | 7722 | TCTGACTATGGTTTGG | 53 | 445 |
| 886076 | N/A | N/A | 8596 | 8611 | CGATTATGTGCAGAGA | 53 | 446 |
| 886096 | N/A | N/A | 9147 | 9162 | TCCTAAGTGATCAGGA | 85 | 447 |
| 886116 | N/A | N/A | 9710 | 9725 | TCGCTATGGCCTACCC | 27 | 448 |
| 886136 | N/A | N/A | 10211 | 10226 | CCAATAGGACTGGGAC | 40 | 449 |
| 886156 | N/A | N/A | 10710 | 10725 | TGTAACATGCTACAGG | 37 | 450 |
| 886176 | N/A | N/A | 11161 | 11176 | CTCAATCAAAGAGGCC | 47 | 451 |
| 886196 | N/A | N/A | 11872 | 11887 | AGGCAGGCGGAGTCAA | 37 | 452 |
| 886216 | N/A | N/A | 12389 | 12404 | TCTTACTTAAGCCCCT | 62 | 453 |
| 886236 | N/A | N/A | 13401 | 13416 | AGATATCCCAAGGGAA | 67 | 454 |
| 886256 | N/A | N/A | 13960 | 13975 | TCCCGAAGTGGGAAGT | 83 | 455 |
| 886276 | N/A | N/A | 14397 | 14412 | GTGCACCCAACTCCTT | 77 | 456 |
| 886296 | N/A | N/A | 15129 | 15144 | GGGCAAGCCAGGACTG | 104 | 457 |
| 886315 | N/A | N/A | 15930 | 15945 | AGCCATTCCTTGGGTA | 50 | 458 |
| 886335 | N/A | N/A | 16551 | 16566 | ACATAGGACAGGCTCA | 46 | 459 |
| 886355 | N/A | N/A | 17369 | 17384 | GCTCAAGCCCAAAACG | 48 | 460 |
| 886375 | N/A | N/A | 18374 | 18389 | GCCAAACCACTGACCA | 46 | 461 |
| 886395 | N/A | N/A | 18817 | 18832 | GCCTACTGCAATTCTA | 75 | 462 |
| 886415 | N/A | N/A | 19321 | 19336 | AAGAATTGCTCTTGGA | 35 | 463 |
| 886434 | N/A | N/A | 19723 | 19738 | GGCGATGAAGGTGACG | 34 | 464 |
| 886454 | N/A | N/A | 20137 | 20152 | AGCCATGAGAGGGTAA | 73 | 465 |
| 886474 | N/A | N/A | 21298 | 21313 | TGCAAAGTGGAGGCCT | 83 | 466 |
| 886494 | N/A | N/A | 21752 | 21767 | TTGCAGGTCATACGGT | 32 | 467 |
| 886513 | N/A | N/A | 22746 | 22761 | CCCCAATCAGAGCCAT | 76 | 468 |
| 886533 | N/A | N/A | 23455 | 23470 | GGACATTGATTGTAGC | 41 | 469 |
| 886553 | N/A | N/A | 24594 | 24609 | TGCAACTGGAACTGGA | 69 | 470 |
| 886573 | N/A | N/A | 25499 | 25514 | GATCTTTACTTCTGGT | 65 | 471 |
| 886593 | N/A | N/A | 26780 | 26795 | AAATGACGGCTAATGG | 62 | 472 |
| 886613 | N/A | N/A | 27140 | 27155 | AGTACTCACAGCTCTG | 69 | 473 |
| 886633 | N/A | N/A | 27704 | 27719 | GGTAAAGATCACGGGA | 46 | 474 |
| 886653 | N/A | N/A | 28834 | 28849 | CTGATTATGTGTCCAG | 34 | 475 |
| 886673 | N/A | N/A | 29221 | 29236 | CTGCACACTATGCATA | 79 | 476 |
| 886693 | N/A | N/A | 29626 | 29641 | CGTCAACCTTCCAATG | 58 | 477 |
| 886713 | N/A | N/A | 30238 | 30253 | ATAACGAGCCTGTACA | 66 | 478 |
| 886733 | N/A | N/A | 30984 | 30999 | GACCAACAGATAACTG | 70 | 479 |
| 886753 | N/A | N/A | 31318 | 31333 | CCCTAATCTACTTAGC | 72 | 480 |
| 886773 | N/A | N/A | 31813 | 31828 | CCTAATGCAATCAAGA | 49 | 481 |
| 886793 | N/A | N/A | 32682 | 32697 | ATCTAATCATCCAACC | 53 | 482 |
| 886813 | N/A | N/A | 33534 | 33549 | TGGAAGGTGCAGCTAT | 60 | 483 |
| 886833 | N/A | N/A | 34121 | 34136 | CTCATATAATAGGCTG | 49 | 484 |
| 886853 | N/A | N/A | 34573 | 34588 | CAGGATGGGTAGGTCT | 59 | 485 |
| 886873 | N/A | N/A | 35136 | 35151 | GTGCAGCGACTAACTA | 58 | 486 |
| 886893 | N/A | N/A | 35572 | 35587 | CATTGCGGGTTAATTG | 56 | 487 |
| 886913 | N/A | N/A | 36065 | 36080 | TCAAACTGATGGCCCC | 61 | 488 |
| 886933 | N/A | N/A | 36490 | 36505 | AGCCAATGGAAGTGAA | 48 | 489 |

TABLE 16
Percent control of human PMP22 RNA with 3-10-3 cEt gapmers

| | SEQ | SEQ | SEQ | SEQ | | PMP22 | |
|---|---|---|---|---|---|---|---|
| | ID | ID | ID | ID | | (% | |
| | NO: 1 | NO: 1 | NO: 2 | NO: 2 | | UTC) | SEQ |
| Compound | Start | Stop | Start | Stop | | RTS | ID |
| ID | Site | Site | Site | Site | Sequence (5′ to 3′) | 35670 | NO |
| 684394 | 1489 | 1504 | 37852 | 37867 | ATTATTCAGGTCTCCA | 14 | 31 |
| 684432 | 1674 | 1689 | 38037 | 38052 | CAGAACAGCCTAGACC | 65 | 490 |
| 885427 | 209 | 224 | 7244 | 7259 | CTGCTCAGCGGAGTTT | 56* | 491 |
| 885447 | 236 | 251 | 7271 | 7286 | ACAGGAGGAGCATTCT | 27* | 492 |
| 885467 | 319 | 334 | 8810 | 8825 | ATTGCCCACGATCCAT | 38 | 493 |
| 885487 | 452 | 467 | 28425 | 28440 | TGCTGAAGATGATCGA | 87 | 494 |
| 885506 | 578 | 593 | 36941 | 36956 | CCGTGTAGATGGCCGC | 51 | 495 |
| 885525 | 608 | 623 | 36971 | 36986 | CCGAGTTGAGATGCCA | 53 | 496 |
| 885545 | 685 | 700 | 37048 | 37063 | CACATAGATGACACCG | 31 | 497 |
| 885565 | 858 | 873 | 37221 | 37236 | AATCAACAGCAACCCC | 47 | 498 |
| 885585 | 971 | 986 | 37334 | 37349 | TAAGGCTCAACACGAG | 61 | 499 |
| 885605 | 1021 | 1036 | 37384 | 37399 | TACTGAGCTGGATTAT | 45 | 500 |
| 885625 | 1161 | 1176 | 37524 | 37539 | GGTTTCTACCCACACT | 58 | 501 |
| 885645 | 1228 | 1243 | 37591 | 37606 | TCGGGCAGCGGCTGTT | 17 | 502 |
| 885665 | 1297 | 1312 | 37660 | 37675 | AGCCGTGTTTTTGCAA | 45 | 503 |
| 885685 | 1334 | 1349 | 37697 | 37712 | ATACTCCACCTGTAAG | 43 | 504 |
| 885705 | 1380 | 1395 | 37743 | 37758 | TCAAAGACTTGTTGTC | 37 | 505 |
| 885722 | 1535 | 1550 | 37898 | 37913 | CCTAGCTAGGTACAAA | 80 | 506 |
| 885742 | 1614 | 1629 | 37977 | 37992 | TGTTCTGATGCTCCGA | 54 | 507 |
| 885780 | N/A | N/A | 5412 | 5427 | CCCTTTAACGGGAACA | 86 | 508 |
| 885800 | N/A | N/A | 5518 | 5533 | CAAACACAAACTCGGG | 40 | 509 |
| 885840 | N/A | N/A | 7185 | 7200 | GCCGAGCGACGGAGGC | 96 | 510 |
| 885860 | N/A | N/A | 7231 | 7246 | TTTCTGCCTGCGAGGA | 62* | 511 |
| 885900 | N/A | N/A | 32740 | 32755 | CTTAATCCCGGTAACC | 44 | 512 |
| 885920 | N/A | N/A | 33112 | 33127 | GGGCCTGATCATAGTT | 59 | 513 |
| 885940 | N/A | N/A | 3566 | 3581 | ACCAACACTTATGTGA | 53 | 514 |
| 885960 | N/A | N/A | 4594 | 4609 | ATTCATAGCCTCCTAA | 90 | 515 |
| 885997 | N/A | N/A | 5838 | 5853 | CTTCAGCAAGGCGAGA | 41 | 516 |
| 886017 | N/A | N/A | 6457 | 6472 | TGCTCTTGCGCTAGAC | 46 | 517 |
| 886037 | N/A | N/A | 6996 | 7011 | CGGAACATCTTTTGCT | 56 | 518 |
| 886057 | N/A | N/A | 7716 | 7731 | ATTCACCCATCTGACT | 75 | 519 |
| 886077 | N/A | N/A | 8607 | 8622 | GCACACAGAAACGATT | 68 | 520 |
| 886097 | N/A | N/A | 9185 | 9200 | TCCCAGGTCGATATTT | 51 | 521 |
| 886117 | N/A | N/A | 9715 | 9730 | ATCAATCGCTATGGCC | 24 | 522 |
| 886137 | N/A | N/A | 10231 | 10246 | GATTAAGCACTGTTCT | 57 | 523 |
| 886157 | N/A | N/A | 10740 | 10755 | TCCAACGGCAGAAGAC | 22 | 524 |
| 886177 | N/A | N/A | 11191 | 11206 | AGCTTATTGTCTGCAG | 47 | 525 |
| 886197 | N/A | N/A | 11877 | 11892 | CGAGAAGGCAGGCGGA | 20 | 526 |
| 886217 | N/A | N/A | 12435 | 12450 | GGCTACCTACTTCCAG | 58 | 527 |
| 886237 | N/A | N/A | 13527 | 13542 | CTCTAGATGTTTGGCT | 49 | 528 |
| 886257 | N/A | N/A | 14002 | 14017 | GAAATAGTCCTGCATG | 64 | 529 |
| 886277 | N/A | N/A | 14434 | 14449 | GGTCTAAGGAAATCAC | 23 | 530 |
| 886297 | N/A | N/A | 15232 | 15247 | GACTTTGTGAGCAGGG | 28 | 531 |
| 886316 | N/A | N/A | 15955 | 15970 | TCTCATAAGAGCCTGT | 26 | 532 |
| 886336 | N/A | N/A | 16638 | 16653 | CTCCAACTCCTTGTGA | 80 | 533 |
| 886356 | N/A | N/A | 17382 | 17397 | TTACACACCAGTTGCT | 68 | 534 |
| 886376 | N/A | N/A | 18421 | 18436 | GCAAAGAGAGAGCGGC | 24 | 535 |
| 886396 | N/A | N/A | 18853 | 18868 | CCGTTTACAAGCACAA | 35 | 536 |
| 886416 | N/A | N/A | 19340 | 19355 | GAGTAGGCTTTGTTTC | 57 | 537 |
| 886435 | N/A | N/A | 19732 | 19747 | GCTCACAAAGGCGATG | 39 | 538 |
| 886455 | N/A | N/A | 20266 | 20281 | CCCCATATCAAGTCCC | 55 | 539 |
| 886475 | N/A | N/A | 21348 | 21363 | AGAACTTATGTTGAGT | 43 | 540 |
| 886495 | N/A | N/A | 21805 | 21820 | CTGCACAGATAGCAAA | 88 | 541 |
| 886514 | N/A | N/A | 22761 | 22776 | TCAGATGATGCTGCTC | 33 | 542 |
| 886534 | N/A | N/A | 23507 | 23522 | TCTACTATATCCTGGA | 57 | 543 |
| 886554 | N/A | N/A | 24600 | 24615 | CCATATTGCAACTGGA | 45 | 544 |
| 886574 | N/A | N/A | 25548 | 25563 | GGCCAGAGAGTTGTTT | 95 | 545 |
| 886594 | N/A | N/A | 26786 | 26801 | GTAAGAAAATGACGGC | 33 | 546 |
| 886614 | N/A | N/A | 27155 | 27170 | TTCAATGCTTCACCCA | 24 | 547 |
| 886634 | N/A | N/A | 27781 | 27796 | GGGCTTATCAGAACTT | 77 | 548 |
| 886654 | N/A | N/A | 28849 | 28864 | CCTCAGTATTCACCTC | 44 | 549 |
| 886674 | N/A | N/A | 29258 | 29273 | GAAGATGTCACCCTGT | 74 | 550 |
| 886694 | N/A | N/A | 29640 | 29655 | TACAACCCTATTTACG | 79 | 551 |
| 886714 | N/A | N/A | 30277 | 30292 | CATTTATCCTCTGGTG | 22 | 552 |
| 886734 | N/A | N/A | 31036 | 31051 | TGCTATTACAGCTCAG | 48 | 553 |
| 886754 | N/A | N/A | 31324 | 31339 | CAACAACCCTAATCTA | 63 | 554 |
| 886774 | N/A | N/A | 31819 | 31834 | AGCCAACCTAATGCAA | 55 | 555 |
| 886794 | N/A | N/A | 32700 | 32715 | TGCCGAGGAAACACAA | 55 | 556 |
| 886814 | N/A | N/A | 33570 | 33585 | GGAAAGGGATGTCAGT | 48 | 557 |
| 886834 | N/A | N/A | 34128 | 34143 | ACGGACTCTCATATAA | 76 | 558 |
| 886854 | N/A | N/A | 34610 | 34625 | TGCTGAGCATTCAACT | 39 | 559 |
| 886874 | N/A | N/A | 35141 | 35156 | GAGAAGTGCAGCGACT | 49 | 560 |
| 886894 | N/A | N/A | 35579 | 35594 | GCGAAATCATTGCGGG | 53 | 561 |
| 886914 | N/A | N/A | 36077 | 36092 | GAGCAGCCACGCTCAA | 55 | 562 |
| 886934 | N/A | N/A | 36502 | 36517 | GGCATTACCTAAAGCC | 50 | 563 |
| 886951 | N/A | N/A | 5153 | 5168 | GACCGAGAAACTGGCT | 43 | 564 |

TABLE 17
Percent control of human PMP22 RNA with 3-10-3 cEt gapmers

| | SEQ | SEQ | SEQ | SEQ | | PMP22 | |
|---|---|---|---|---|---|---|---|
| | ID | ID | ID | ID | | (% | |
| | NO: 1 | NO: 1 | NO: 2 | NO: 2 | | UTC) | SEQ |
| Compound | Start | Stop | Start | Stop | | RTS | ID |
| ID | Site | Site | Site | Site | Sequence (5′ to 3′) | 35670 | NO |
| 684227 | 579 | 594 | 36942 | 36957 | ACCGTGTAGATGGCCG | 70 | 565 |
| 684376 | 1418 | 1433 | 37781 | 37796 | TTAGTGATAATAAGGA | 18 | 566 |
| 684394 | 1489 | 1504 | 37852 | 37867 | ATTATTCAGGTCTCCA | 32 | 31 |
| 885428 | 210 | 225 | 7245 | 7260 | TCTGCTCAGCGGAGTT | 53* | 567 |
| 885448 | 237 | 252 | 7272 | 7287 | AACAGGAGGAGCATTC | 30* | 568 |
| 885468 | 320 | 335 | 8811 | 8826 | CATTGCCCACGATCCA | 69 | 569 |
| 885488 | 492 | 507 | 28465 | 28480 | AGGGTGAAGAGTTGGC | 63 | 570 |
| 885526 | 611 | 626 | 36974 | 36989 | AATCCGAGTTGAGATG | 86 | 571 |
| 885546 | 694 | 709 | 37057 | 37072 | CCGCAAGATCACATAG | 40 | 572 |
| 885566 | 881 | 896 | 37244 | 37259 | CCGGAGATATTATATA | 63 | 573 |
| 885586 | 972 | 987 | 37335 | 37350 | TTAAGGCTCAACACGA | 47 | 574 |
| 885606 | 1022 | 1037 | 37385 | 37400 | ATACTGAGCTGGATTA | 33 | 575 |
| 885626 | 1179 | 1194 | 37542 | 37557 | GGGCTTTTGGACATTT | 41 | 576 |
| 885646 | 1229 | 1244 | 37592 | 37607 | TTCGGGCAGCGGCTGT | 22 | 577 |
| 885666 | 1299 | 1314 | 37662 | 37677 | CAAGCCGTGTTTTTGC | 48 | 578 |
| 885686 | 1338 | 1353 | 37701 | 37716 | GAAGATACTCCACCTG | 47 | 579 |
| 885723 | 1537 | 1552 | 37900 | 37915 | AGCCTAGCTAGGTACA | 37 | 580 |
| 885743 | 1615 | 1630 | 37978 | 37993 | TTGTTCTGATGCTCCG | 79 | 581 |
| 885762 | 1696 | 1711 | 38059 | 38074 | TGCCAGACAGTCCTTG | 62 | 582 |
| 885781 | N/A | N/A | 5416 | 5431 | GTTCCCCTTTAACGGG | 157 | 583 |
| 885801 | N/A | N/A | 5536 | 5551 | CGATCCTCAGGGTGGC | 72 | 584 |
| 885841 | N/A | N/A | 7187 | 7202 | GGGCCGAGCGACGGAG | 85 | 585 |
| 885861 | N/A | N/A | 7234 | 7249 | GAGTTTCTGCCTGCGA | 32* | 586 |
| 885901 | N/A | N/A | 32741 | 32756 | TCTTAATCCCGGTAAC | 67 | 587 |
| 885921 | N/A | N/A | 2838 | 2853 | ACTCACCCGGCCAAAC | 90* | 588 |
| 885941 | N/A | N/A | 3626 | 3641 | GTTAGATTTGCTCTAG | 25 | 589 |
| 885961 | N/A | N/A | 4644 | 4659 | TGCGAGGTGGCCATTT | 69 | 590 |
| 885980 | N/A | N/A | 5164 | 5179 | GACCTAGTGTTGACCG | 34 | 591 |
| 885998 | N/A | N/A | 5882 | 5897 | CGCCACAGGGACTGTT | 88 | 592 |
| 886018 | N/A | N/A | 6465 | 6480 | GGGCATTCTGCTCTTG | 73 | 593 |
| 886038 | N/A | N/A | 7004 | 7019 | GCCTGCAACGGAACAT | 67 | 594 |
| 886058 | N/A | N/A | 7742 | 7757 | GTCCTAAAAGGGTGTT | 61 | 595 |
| 886078 | N/A | N/A | 8670 | 8685 | CTGCATGGTAAGAGCC | 27 | 596 |
| 886098 | N/A | N/A | 9205 | 9220 | TATCATACCACCTTCA | 69 | 597 |
| 886118 | N/A | N/A | 9725 | 9740 | GGCTCTTAACATCAAT | 30 | 598 |
| 886138 | N/A | N/A | 10301 | 10316 | CACCATGCAAACCCAC | 45 | 599 |
| 886158 | N/A | N/A | 10746 | 10761 | GCTATTTCCAACGGCA | 55 | 600 |
| 886178 | N/A | N/A | 11247 | 11262 | GAGCATAGTTCATTTG | 22 | 601 |
| 886198 | N/A | N/A | 11936 | 11951 | GCCCACACGAGGCAGA | 87 | 602 |
| 886218 | N/A | N/A | 12487 | 12502 | TAGAAAGTGTCTGCAT | 52 | 603 |
| 886238 | N/A | N/A | 13538 | 13553 | GTCAAGGCAGACTCTA | 58 | 604 |
| 886258 | N/A | N/A | 14017 | 14032 | ACGAGAGTTGTTCAAG | 44 | 605 |
| 886278 | N/A | N/A | 14451 | 14466 | ACCCGTGGAAGACAGC | 44 | 606 |
| 886298 | N/A | N/A | 15290 | 15305 | GCCTAACACCTCAGCA | 107 | 607 |
| 886317 | N/A | N/A | 15974 | 15989 | TACCACCAGGGTCTCA | 53 | 608 |
| 886337 | N/A | N/A | 16682 | 16697 | TTCCACTACCCATAGT | 80 | 609 |
| 886357 | N/A | N/A | 17434 | 17449 | CCGCAAATCTTCTGTT | 66 | 610 |
| 886377 | N/A | N/A | 18433 | 18448 | GAGAATGGTGTGGCAA | 32 | 611 |
| 886397 | N/A | N/A | 18865 | 18880 | GTAAACCAATGCCCGT | 51 | 612 |
| 886417 | N/A | N/A | 19379 | 19394 | TTTATACCCTTGTTGG | 45 | 613 |
| 886436 | N/A | N/A | 19755 | 19770 | AGACAACTATGTGCCA | 49 | 614 |
| 886456 | N/A | N/A | 20353 | 20368 | AGTGAGTTAAGGGCTC | 48 | 615 |
| 886476 | N/A | N/A | 21349 | 21364 | TAGAACTTATGTTGAG | 24 | 616 |
| 886496 | N/A | N/A | 21841 | 21856 | CAGCATAAGGGTGCTA | 74 | 617 |
| 886515 | N/A | N/A | 22803 | 22818 | GCTCAAAGGGAACCCC | 64 | 618 |
| 886535 | N/A | N/A | 23523 | 23538 | TGTGTTCAAGTGCTTA | 19 | 619 |
| 886555 | N/A | N/A | 24606 | 24621 | CCTAATCCATATTGCA | 57 | 620 |
| 886575 | N/A | N/A | 25559 | 25574 | AGGATAAAAGTGGCCA | 47 | 621 |
| 886595 | N/A | N/A | 26833 | 26848 | GCACAACATATGCTTC | 35 | 622 |
| 886615 | N/A | N/A | 27164 | 27179 | AAGCATACCTTCAATG | 59 | 623 |
| 886635 | N/A | N/A | 27786 | 27801 | TTGAAGGGCTTATCAG | 80 | 624 |
| 886655 | N/A | N/A | 28857 | 28872 | ACAGATAGCCTCAGTA | 76 | 625 |
| 886675 | N/A | N/A | 29286 | 29301 | TGCTAGGCAGAATCCA | 58 | 626 |
| 886695 | N/A | N/A | 29667 | 29682 | CATCTAACCTTGGGCT | 77 | 627 |
| 886715 | N/A | N/A | 30319 | 30334 | CACTCAACCGTCCCTG | 49 | 628 |
| 886735 | N/A | N/A | 31065 | 31080 | GGACACTCTCAGGACT | 55 | 629 |
| 886755 | N/A | N/A | 31373 | 31388 | GTTAAGTTGTCACTTG | 49 | 630 |
| 886775 | N/A | N/A | 31845 | 31860 | AGCCTTTTGATATGCA | 56 | 631 |
| 886795 | N/A | N/A | 32708 | 32723 | TTTGATTCTGCCGAGG | 26 | 632 |
| 886815 | N/A | N/A | 33625 | 33640 | TCGCAAAAGCACTTTC | 50 | 633 |
| 886835 | N/A | N/A | 34133 | 34148 | GCCACACGGACTCTCA | 83 | 634 |
| 886855 | N/A | N/A | 34628 | 34643 | GTCCAGACAATACAAA | 79 | 635 |
| 886875 | N/A | N/A | 35146 | 35161 | GTATAGAGAAGTGCAG | 46 | 636 |
| 886895 | N/A | N/A | 35586 | 35601 | GTCAGGAGCGAAATCA | 52 | 637 |
| 886915 | N/A | N/A | 36139 | 36154 | GCCCACCAATGCAGCC | 82 | 638 |
| 886935 | N/A | N/A | 36512 | 36527 | AGTGAGTGGTGGCATT | 74 | 639 |

TABLE 18
Percent control of human PMP22 RNA with 3-10-3 cEt gapmers

| | SEQ | SEQ | SEQ | SEQ | | PMP22 | |
|---|---|---|---|---|---|---|---|
| | ID | ID | ID | ID | | (% | |
| | NO: 1 | NO: 1 | NO: 2 | NO: 2 | | UTC) | SEQ |
| Compound | Start | Stop | Start | Stop | Sequence | RTS | ID |
| ID | Site | Site | Site | Site | (5′ to 3′) | 35670 | NO |
| 684394 | 1489 | 1504 | 37852 | 37867 | ATTATTCAGGTCTCCA | 8 | 31 |
| 885429 | 212 | 227 | 7247 | 7262 | GTTCTGCTCAGCGGAG | 55* | 640 |
| 885449 | 246 | 261 | 7281 | 7296 | ATACTCAGCAACAGGA | 20* | 641 |
| 885469 | 322 | 337 | 8813 | 8828 | TCCATTGCCCACGATC | 40 | 642 |
| 885489 | 503 | 518 | 28476 | 28491 | CCCCCTTGGTGAGGGT | 114 | 643 |
| 885507 | 581 | 596 | 36944 | 36959 | TCACCGTGTAGATGGC | 40 | 644 |
| 885527 | 612 | 627 | 36975 | 36990 | TAATCCGAGTTGAGAT | 45 | 645 |
| 885547 | 695 | 710 | 37058 | 37073 | TCCGCAAGATCACATA | 65 | 646 |
| 885567 | 882 | 897 | 37245 | 37260 | ACCGGAGATATTATAT | 76 | 647 |
| 885587 | 973 | 988 | 37336 | 37351 | TTTAAGGCTCAACACG | 46 | 648 |
| 885607 | 1024 | 1039 | 37387 | 37402 | AAATACTGAGCTGGAT | 64 | 649 |
| 885627 | 1180 | 1195 | 37543 | 37558 | AGGGCTTTTGGACATT | 21 | 650 |
| 885647 | 1231 | 1246 | 37594 | 37609 | GGTTCGGGCAGCGGCT | 31 | 651 |
| 885667 | 1300 | 1315 | 37663 | 37678 | ACAAGCCGTGTTTTTG | 57 | 652 |
| 885687 | 1339 | 1354 | 37702 | 37717 | CGAAGATACTCCACCT | 50 | 653 |
| 885706 | 1427 | 1442 | 37790 | 37805 | TTTAGATGATTAGTGA | 43 | 654 |
| 885724 | 1538 | 1553 | 37901 | 37916 | CAGCCTAGCTAGGTAC | 54 | 655 |
| 885744 | 1618 | 1633 | 37981 | 37996 | CGCTTGTTCTGATGCT | 103 | 656 |
| 885763 | 1697 | 1712 | 38060 | 38075 | TTGCCAGACAGTCCTT | 39 | 657 |
| 885782 | N/A | N/A | 5453 | 5468 | CGCGCGCGAAGCAAGG | 69 | 658 |
| 885802 | N/A | N/A | 5537 | 5552 | CCGATCCTCAGGGTGG | 53 | 659 |
| 885842 | N/A | N/A | 7188 | 7203 | TGGGCCGAGCGACGGA | 67 | 660 |
| 885862 | N/A | N/A | 7236 | 7251 | CGGAGTTTCTGCCTGC | 40* | 661 |
| 885902 | N/A | N/A | 32742 | 32757 | TTCTTAATCCCGGTAA | 67 | 662 |
| 885922 | N/A | N/A | 2880 | 2895 | AGCATAGGCACACATC | 23 | 663 |
| 885942 | N/A | N/A | 3781 | 3796 | CTCTGATAGGTAGGTA | 25 | 664 |
| 885962 | N/A | N/A | 4650 | 4665 | GGCGGGTGCGAGGTGG | 89 | 665 |
| 885981 | N/A | N/A | 5215 | 5230 | GGCGGCTGAGCTTTCT | 39 | 666 |
| 885999 | N/A | N/A | 5903 | 5918 | GTCCAACACTCTCGGG | 54 | 667 |
| 886019 | N/A | N/A | 6504 | 6519 | GTCCACCGCGCGCTTC | 45 | 668 |
| 886039 | N/A | N/A | 7086 | 7101 | AGCCTTCGCGCCGCCT | 41 | 669 |
| 886059 | N/A | N/A | 7802 | 7817 | GCCGACATGGGACCTG | 48 | 670 |
| 886079 | N/A | N/A | 8692 | 8707 | CACCTAGCCACACCGC | 42 | 671 |
| 886099 | N/A | N/A | 9212 | 9227 | GCTTAGCTATCATACC | 53 | 672 |
| 886119 | N/A | N/A | 9732 | 9747 | GTCCACGGGCTCTTAA | 78 | 673 |
| 886139 | N/A | N/A | 10360 | 10375 | CAGTGCTACGGTCACA | 25 | 674 |
| 886159 | N/A | N/A | 10758 | 10773 | CACCAACTGACAGCTA | 42 | 675 |
| 886179 | N/A | N/A | 11254 | 11269 | TCGCAATGAGCATAGT | 16 | 676 |
| 886199 | N/A | N/A | 11957 | 11972 | CACTAAGCCTCTCTTA | 98 | 677 |
| 886219 | N/A | N/A | 12574 | 12589 | GAATCATGGATGAGAT | 34 | 678 |
| 886239 | N/A | N/A | 13544 | 13559 | CGTCAAGTCAAGGCAG | 49 | 679 |
| 886259 | N/A | N/A | 14022 | 14037 | GGTACACGAGAGTTGT | 37 | 680 |
| 886279 | N/A | N/A | 14459 | 14474 | ACTGAGAAACCCGTGG | 41 | 681 |
| 886299 | N/A | N/A | 15359 | 15374 | TGCTTTGGTGTTGAGC | 77 | 682 |
| 886318 | N/A | N/A | 16002 | 16017 | ACACATTCCGTCCTCT | 26 | 683 |
| 886338 | N/A | N/A | 16693 | 16708 | TGCAGAGCATGTTCCA | 28 | 684 |
| 886358 | N/A | N/A | 17441 | 17456 | CACCTTCCCGCAAATC | 62 | 685 |
| 886378 | N/A | N/A | 18452 | 18467 | AAACTAGAGAGGGTGG | 50 | 686 |
| 886398 | N/A | N/A | 18879 | 18894 | CCCCACCAGTGACAGT | 50 | 687 |
| 886418 | N/A | N/A | 19400 | 19415 | TAGTAAGCTGTCTGAG | 56 | 688 |
| 886437 | N/A | N/A | 19776 | 19791 | TGCGGAAAGCAAAACA | 44 | 689 |
| 886457 | N/A | N/A | 20364 | 20379 | GCCTACAACCTAGTGA | 89 | 690 |
| 886477 | N/A | N/A | 21350 | 21365 | GTAGAACTTATGTTGA | 24 | 691 |
| 886516 | N/A | N/A | 22824 | 22839 | GATTCAAGAGCTCTCG | 53 | 692 |
| 886536 | N/A | N/A | 23532 | 23547 | GACACTATATGTGTTC | 80 | 693 |
| 886556 | N/A | N/A | 24675 | 24690 | CTGGATAGAAACACTC | 50 | 694 |
| 886576 | N/A | N/A | 25577 | 25592 | AATAGAACTTATGTTG | 73 | 695 |
| 886596 | N/A | N/A | 26855 | 26870 | GTCTAGCACTCTTCAC | 59 | 696 |
| 886616 | N/A | N/A | 27184 | 27199 | GCCATATGTAATGGCT | 103 | 697 |
| 886636 | N/A | N/A | 27822 | 27837 | GCCTACTACCTTCCCT | 68 | 698 |
| 886656 | N/A | N/A | 28863 | 28878 | TGCTCTACAGATAGCC | 49 | 699 |
| 886676 | N/A | N/A | 29287 | 29302 | ATGCTAGGCAGAATCC | 54 | 700 |
| 886696 | N/A | N/A | 29672 | 29687 | ACCAACATCTAACCTT | 52 | 701 |
| 886716 | N/A | N/A | 30330 | 30345 | ATTCAGTGTAACACTC | 30 | 702 |
| 886736 | N/A | N/A | 31070 | 31085 | GGACAGGACACTCTCA | 38 | 703 |
| 886756 | N/A | N/A | 31450 | 31465 | TCACATCCCATGAGTG | 51 | 704 |
| 886776 | N/A | N/A | 31878 | 31893 | AGCTCAGGTTGAAAGC | 94 | 705 |
| 886796 | N/A | N/A | 33197 | 33212 | TATTAATCCCCCCCCA | 88 | 706 |
| 886816 | N/A | N/A | 33632 | 33647 | GGTAACCTCGCAAAAG | 64 | 707 |
| 886836 | N/A | N/A | 34156 | 34171 | GTCCAAACTGGAGAAC | 64 | 708 |
| 886856 | N/A | N/A | 34659 | 34674 | GGTCATCTTTAAGCAG | 65 | 709 |
| 886876 | N/A | N/A | 35175 | 35190 | TCCTTGAACAAGAGGG | 88 | 710 |
| 886896 | N/A | N/A | 35592 | 35607 | GGCCATGTCAGGAGCG | 106 | 711 |
| 886916 | N/A | N/A | 36171 | 36186 | GGATATGCAGGTGGGT | 108 | 712 |
| 886936 | N/A | N/A | 36529 | 36544 | CTATATGCCACTCTAC | 99 | 713 |
| 886957 | N/A | N/A | 21861 | 21876 | ATCAATTCATATCTCC | 52 | 714 |

TABLE 19
Percent control of human PMP22 RNA with 3-10-3
cEt gapmers

| | SEQ | SEQ | SEQ | SEQ | | PMP22 | |
|---|---|---|---|---|---|---|---|
| | ID | ID | ID | ID | | (% | |
| | NO: 1 | NO: 1 | NO: 2 | NO: 2 | | UTC) | SEQ |
| Compound | Start | Stop | Start | Stop | Sequence | RTS | ID |
| ID | Site | Site | Site | Site | (5′ to 3′) | 35670 | NO |
| 684394 | 1489 | 1504 | 37852 | 37867 | ATTATTCAGGTCTCCA | 16 | 31 |
| 885430 | 213 | 228 | 7248 | 7263 | AGTTCTGCTCAGCGGA | 37* | 715 |
| 885450 | 248 | 263 | 7283 | 7298 | TGATACTCAGCAACAG | 23* | 716 |
| 885470 | 341 | 356 | 8832 | 8847 | GCCAGAGATCAGTTGC | 37 | 717 |
| 885490 | 505 | 520 | 28478 | 28493 | GCCCCCCTTGGTGAGG | 94 | 718 |
| 885508 | 582 | 597 | 36945 | 36960 | CTCACCGTGTAGATGG | 52 | 719 |
| 885528 | 613 | 628 | 36976 | 36991 | GTAATCCGAGTTGAGA | 53 | 720 |
| 885548 | 696 | 711 | 37059 | 37074 | TTCCGCAAGATCACAT | 52 | 721 |
| 885568 | 884 | 899 | 37247 | 37262 | AAACCGGAGATATTAT | 54 | 722 |
| 885588 | 980 | 995 | 37343 | 37358 | CTACTTCTTTAAGGCT | 40 | 723 |
| 885608 | 1080 | 1095 | 37443 | 37458 | GATGGAGTTATCTTAT | 39 | 724 |
| 885628 | 1181 | 1196 | 37544 | 37559 | AAGGGCTTTTGGACAT | 26 | 725 |
| 885648 | 1232 | 1247 | 37595 | 37610 | AGGTTCGGGCAGCGGC | 33 | 726 |
| 885668 | 1302 | 1317 | 37665 | 37680 | CCACAAGCCGTGTTTT | 43 | 727 |
| 885688 | 1340 | 1355 | 37703 | 37718 | ACGAAGATACTCCACC | 43 | 728 |
| 885707 | 1429 | 1444 | 37792 | 37807 | TGTTTAGATGATTAGT | 29 | 729 |
| 885725 | 1539 | 1554 | 37902 | 37917 | GCAGCCTAGCTAGGTA | 51 | 730 |
| 885745 | 1619 | 1634 | 37982 | 37997 | ACGCTTGTTCTGATGC | 57 | 731 |
| 885764 | 1698 | 1713 | 38061 | 38076 | ATTGCCAGACAGTCCT | 32 | 732 |
| 885783 | N/A | N/A | 5454 | 5469 | GCGCGCGCGAAGCAAG | 79 | 733 |
| 885803 | N/A | N/A | 5538 | 5553 | CCCGATCCTCAGGGTG | 60 | 734 |
| 885843 | N/A | N/A | 7189 | 7204 | CTGGGCCGAGCGACGG | 69 | 735 |
| 885863 | N/A | N/A | 7237 | 7252 | GCGGAGTTTCTGCCTG | 43* | 736 |
| 885903 | N/A | N/A | 32743 | 32758 | GTTCTTAATCCCGGTA | 32 | 737 |
| 885923 | N/A | N/A | 2885 | 2900 | TGTAAAGCATAGGCAC | 39 | 738 |
| 885943 | N/A | N/A | 3786 | 3801 | TGTAACTCTGATAGGT | 21 | 739 |
| 885963 | N/A | N/A | 4700 | 4715 | TCGGGCTTGGCTGTCA | 34 | 740 |
| 885982 | N/A | N/A | 5224 | 5239 | GAAACCAGAGGCGGCT | 34 | 741 |
| 886000 | N/A | N/A | 5911 | 5926 | CCACAGGAGTCCAACA | 54 | 742 |
| 886020 | N/A | N/A | 6522 | 6537 | CCGGACCCTGCGCTTC | 89 | 743 |
| 886040 | N/A | N/A | 7091 | 7106 | TCAGGAGCCTTCGCGC | 72 | 744 |
| 886060 | N/A | N/A | 7811 | 7826 | TGCCATAAAGCCGACA | 19 | 745 |
| 886080 | N/A | N/A | 8699 | 8714 | CCGCATCCACCTAGCC | 69 | 746 |
| 886100 | N/A | N/A | 9219 | 9234 | GCCAAAGGCTTAGCTA | 69 | 747 |
| 886120 | N/A | N/A | 9738 | 9753 | ATCCAGGTCCACGGGC | 46 | 748 |
| 886140 | N/A | N/A | 10366 | 10381 | GACAAGCAGTGCTACG | 34 | 749 |
| 886160 | N/A | N/A | 10767 | 10782 | TGCTTCTAGCACCAAC | 30 | 750 |
| 886180 | N/A | N/A | 11265 | 11280 | AGTTAAATGGTTCGCA | 16 | 751 |
| 886200 | N/A | N/A | 11969 | 11984 | CGAATATCCCCACACT | 35 | 752 |
| 886220 | N/A | N/A | 12585 | 12600 | CCCTACTGCTTGAATC | 46 | 753 |
| 886240 | N/A | N/A | 13558 | 13573 | GAAAGAAGGAAACGCG | 67 | 754 |
| 886260 | N/A | N/A | 14035 | 14050 | TGCAATAGTCTCTGGT | 55 | 755 |
| 886280 | N/A | N/A | 14483 | 14498 | CTCCAACTTGGAATCA | 52 | 756 |
| 886300 | N/A | N/A | 15378 | 15393 | AGCTCAACAATTCCCT | 15 | 757 |
| 886319 | N/A | N/A | 16039 | 16054 | GAGAAACCCTAAGGGT | 72 | 758 |
| 886339 | N/A | N/A | 16712 | 16727 | GATCACCCTATTTGTT | 66 | 759 |
| 886359 | N/A | N/A | 17446 | 17461 | TTCTACACCTTCCCGC | 34 | 760 |
| 886379 | N/A | N/A | 18468 | 18483 | GACTTAGAATCCACAA | 26 | 761 |
| 886399 | N/A | N/A | 18925 | 18940 | GAACACGCATTATGGA | 46 | 762 |
| 886419 | N/A | N/A | 19413 | 19428 | GGTTACTGGATAATAG | 40 | 763 |
| 886438 | N/A | N/A | 19782 | 19797 | GATTCATGCGGAAAGC | 26 | 764 |
| 886458 | N/A | N/A | 20383 | 20398 | GCTATATTCTTAGCCC | 44 | 765 |
| 886478 | N/A | N/A | 21351 | 21366 | AGTAGAACTTATGTTG | 32 | 766 |
| 886497 | N/A | N/A | 21910 | 21925 | TATTAGCACATTGGCC | 63 | 767 |
| 886517 | N/A | N/A | 22903 | 22918 | AAGGACAGCGAGAGGA | 71 | 768 |
| 886537 | N/A | N/A | 23552 | 23567 | TGTAACACCTCTAGCG | 32 | 769 |
| 886557 | N/A | N/A | 24686 | 24701 | ATACTAAGTTCCTGGA | 47 | 770 |
| 886577 | N/A | N/A | 25711 | 25726 | AGAGAGACATTGTAGC | 39 | 771 |
| 886597 | N/A | N/A | 26860 | 26875 | TTCTAGTCTAGCACTC | 43 | 772 |
| 886617 | N/A | N/A | 27216 | 27231 | CTGCAGCATTTAATCC | 59 | 773 |
| 886637 | N/A | N/A | 27845 | 27860 | GTGTTAAAGAGGGCCT | 45 | 774 |
| 886657 | N/A | N/A | 28879 | 28894 | TCTCAAGCCTGACCTT | 65 | 775 |
| 886677 | N/A | N/A | 29288 | 29303 | GATGCTAGGCAGAATC | 64 | 776 |
| 886697 | N/A | N/A | 29683 | 29698 | TAGACAAGGTCACCAA | 38 | 777 |
| 886717 | N/A | N/A | 30348 | 30363 | TAAGAAGTACCTCACT | 70 | 778 |
| 886737 | N/A | N/A | 31075 | 31090 | ACGGAGGACAGGACAC | 48 | 779 |
| 886757 | N/A | N/A | 31457 | 31472 | GTAGATTTCACATCCC | 13 | 780 |
| 886777 | N/A | N/A | 31907 | 31922 | TTAAAGGACCTCAGGT | 70 | 781 |
| 886797 | N/A | N/A | 33223 | 33238 | CTCTGAACAGGATGGC | 24 | 782 |
| 886817 | N/A | N/A | 33641 | 33656 | GTGTACTTTGGTAACC | 53 | 783 |
| 886837 | N/A | N/A | 34175 | 34190 | GAGCATAGACGGGCGC | 47 | 784 |
| 886857 | N/A | N/A | 34666 | 34681 | GAGCATAGGTCATCTT | 48 | 785 |
| 886877 | N/A | N/A | 35191 | 35206 | GAGATACCAGATTCCA | 31 | 786 |
| 886897 | N/A | N/A | 35622 | 35637 | CCTACAGGAAGTTCAG | 44 | 787 |
| 886917 | N/A | N/A | 36178 | 36193 | GGGCACTGGATATGCA | 80 | 788 |
| 886937 | N/A | N/A | 36551 | 36566 | GGGTATGGAAACCCCT | 76 | 789 |

TABLE 20
Percent control of human PMP22 RNA with 3-10-3
cEt gapmers

| | SEQ | SEQ | SEQ | SEQ | | PMP22 | |
|---|---|---|---|---|---|---|---|
| | ID | ID | ID | ID | | (% | |
| | NO: 1 | NO: 1 | NO: 2 | NO: 2 | | UTC) | SEQ |
| Compound | Start | Stop | Start | Stop | Sequence | RTS | ID |
| ID | Site | Site | Site | Site | (5′ to 3′) | 35670 | NO |
| 684394 | 1489 | 1504 | 37852 | 37867 | ATTATTCAGGTCTCCA | 3 | 31 |
| 885431 | 214 | 229 | 7249 | 7264 | AAGTTCTGCTCAGCGG | 67* | 790 |
| 885451 | 251 | 266 | 7286 | 7301 | CGATGATACTCAGCAA | 51* | 791 |
| 885471 | 342 | 357 | 8833 | 8848 | TGCCAGAGATCAGTTG | 46 | 792 |
| 885491 | 506 | 521 | 28479 | 28494 | TGCCCCCCTTGGTGAG | 77 | 793 |
| 885509 | 585 | 600 | 36948 | 36963 | TGCCTCACCGTGTAGA | 45 | 794 |
| 885529 | 615 | 630 | 36978 | 36993 | GAGTAATCCGAGTTGA | 58 | 795 |
| 885549 | 699 | 714 | 37062 | 37077 | CGTTTCCGCAAGATCA | 34 | 796 |
| 885569 | 885 | 900 | 37248 | 37263 | TAAACCGGAGATATTA | 45 | 797 |
| 885589 | 981 | 996 | 37344 | 37359 | GCTACTTCTTTAAGGC | 61 | 798 |
| 885609 | 1081 | 1096 | 37444 | 37459 | AGATGGAGTTATCTTA | 37 | 799 |
| 885629 | 1196 | 1211 | 37559 | 37574 | GGTCACCCACCAGAAA | 82 | 800 |
| 885649 | 1233 | 1248 | 37596 | 37611 | GAGGTTCGGGCAGCGG | 41 | 801 |
| 885669 | 1304 | 1319 | 37667 | 37682 | TGCCACAAGCCGTGTT | 52 | 802 |
| 885689 | 1342 | 1357 | 37705 | 37720 | TGACGAAGATACTCCA | 51 | 803 |
| 885708 | 1430 | 1445 | 37793 | 37808 | TTGTTTAGATGATTAG | 60 | 804 |
| 885726 | 1540 | 1555 | 37903 | 37918 | AGCAGCCTAGCTAGGT | 57 | 805 |
| 885746 | 1632 | 1647 | 37995 | 38010 | CCAAGGAGTCTAGACG | 116 | 806 |
| 885765 | 1700 | 1715 | 38063 | 38078 | TCATTGCCAGACAGTC | 27 | 807 |
| 885784 | N/A | N/A | 5455 | 5470 | CGCGCGCGCGAAGCAA | 83 | 808 |
| 885804 | N/A | N/A | 5540 | 5555 | GTCCCGATCCTCAGGG | 73 | 809 |
| 885844 | N/A | N/A | 7190 | 7205 | ACTGGGCCGAGCGACG | 80 | 810 |
| 885864 | N/A | N/A | 7238 | 7253 | AGCGGAGTTTCTGCCT | 59* | 811 |
| 885904 | N/A | N/A | 32744 | 32759 | TGTTCTTAATCCCGGT | 31 | 812 |
| 885924 | N/A | N/A | 2925 | 2940 | TCATTTGCGGCTTGCA | 50 | 813 |
| 885944 | N/A | N/A | 3802 | 3817 | CTGCACTAAAGTAGCT | 44 | 814 |
| 885964 | N/A | N/A | 4706 | 4721 | CAGCAGTCGGGCTTGG | 53 | 815 |
| 886001 | N/A | N/A | 5942 | 5957 | AGCCGATGGCAGGAGG | 18 | 816 |
| 886021 | N/A | N/A | 6535 | 6550 | TCGAGAGGGTTGCCCG | 97 | 817 |
| 886041 | N/A | N/A | 7106 | 7121 | GACCGCCCGCGCGGGT | 104 | 818 |
| 886061 | N/A | N/A | 7843 | 7858 | GTGGAAGCTTTACTAA | 65 | 819 |
| 886081 | N/A | N/A | 8711 | 8726 | GGCGAAAAGCACCCGC | 62 | 820 |
| 886101 | N/A | N/A | 9241 | 9256 | ATCCAATGTCCCAAGG | 27 | 821 |
| 886121 | N/A | N/A | 9748 | 9763 | GATCATGTGGATCCAG | 72 | 822 |
| 886141 | N/A | N/A | 10393 | 10408 | GGAGAAACCGGATGCT | 51 | 823 |
| 886161 | N/A | N/A | 10788 | 10803 | CCCTAGTGCCTCTTTG | 50 | 824 |
| 886181 | N/A | N/A | 11628 | 11643 | AGTCACATGGCGCAGT | 56 | 825 |
| 886201 | N/A | N/A | 11992 | 12007 | AGGCACTGGATACAAT | 69 | 826 |
| 886221 | N/A | N/A | 12664 | 12679 | TGTAAATAGGTGTAGG | 16 | 827 |
| 886241 | N/A | N/A | 13577 | 13592 | CGTGACAATGCTGAGA | 30 | 828 |
| 886261 | N/A | N/A | 14070 | 14085 | CATAAGCTCTTGTTCA | 58 | 829 |
| 886281 | N/A | N/A | 14488 | 14503 | TGTCACTCCAACTTGG | 62 | 830 |
| 886301 | N/A | N/A | 15386 | 15401 | TACAGGAAAGCTCAAC | 47 | 831 |
| 886320 | N/A | N/A | 16053 | 16068 | GGGTATTGGCATCAGA | 24 | 832 |
| 886340 | N/A | N/A | 16719 | 16734 | TCCATTGGATCACCCT | 31 | 833 |
| 886360 | N/A | N/A | 17565 | 17580 | CGGTATAGAGGAATGA | 46 | 834 |
| 886380 | N/A | N/A | 18517 | 18532 | TGATATGCTTGCAATC | 31 | 835 |
| 886400 | N/A | N/A | 18966 | 18981 | AATAGAGTTCTCCTCC | 59 | 836 |
| 886420 | N/A | N/A | 19435 | 19450 | ACGCAGCCACTGAGGT | 35 | 837 |
| 886439 | N/A | N/A | 19788 | 19803 | GCCTATGATTCATGCG | 40 | 838 |
| 886459 | N/A | N/A | 20388 | 20403 | CCTCAGCTATATTCTT | 57 | 839 |
| 886479 | N/A | N/A | 21400 | 21415 | GGCGATACTCTTCCCC | 56 | 840 |
| 886498 | N/A | N/A | 21918 | 21933 | AGCCAGGTTATTAGCA | 64 | 841 |
| 886518 | N/A | N/A | 22925 | 22940 | TGCCATTGATCAAAAG | 64 | 842 |
| 886538 | N/A | N/A | 23692 | 23707 | AGCTACCTGCAGACAC | 43 | 843 |
| 886558 | N/A | N/A | 24747 | 24762 | GGGATACATCAACAAG | 61 | 844 |
| 886578 | N/A | N/A | 26021 | 26036 | AGGCACTCATAAGATA | 67 | 845 |
| 886598 | N/A | N/A | 26869 | 26884 | GGCCTTTGATTCTAGT | 83 | 846 |
| 886618 | N/A | N/A | 27329 | 27344 | TGTAGAGGGAAGCCCA | 83 | 847 |
| 886638 | N/A | N/A | 27930 | 27945 | CATCACTAGGAGTTAA | 61 | 848 |
| 886658 | N/A | N/A | 28910 | 28925 | CTGGAGGCATAATGTA | 50 | 849 |
| 886678 | N/A | N/A | 29296 | 29311 | GCATGTAAGATGCTAG | 55 | 850 |
| 886698 | N/A | N/A | 29822 | 29837 | AGACATGTGTAAGTAG | 28 | 851 |
| 886718 | N/A | N/A | 30528 | 30543 | GTCTTATAGTACAGGC | 50 | 852 |
| 886738 | N/A | N/A | 31092 | 31107 | CTTGACTGGGATTAAC | 60 | 853 |
| 886758 | N/A | N/A | 31475 | 31490 | TGCCGGGCATGCACGC | 38 | 854 |
| 886778 | N/A | N/A | 32258 | 32273 | GACCTGAATACTGTCT | 67 | 855 |
| 886798 | N/A | N/A | 33247 | 33262 | TTGACTTAAGCCACCT | 31 | 856 |
| 886818 | N/A | N/A | 33673 | 33688 | GCAGAGTGATCCAACA | 51 | 857 |
| 886838 | N/A | N/A | 34181 | 34196 | CCCCAAGAGCATAGAC | 95 | 858 |
| 886858 | N/A | N/A | 34702 | 34717 | AATGACCGGGACTCCC | 49 | 859 |
| 886878 | N/A | N/A | 35198 | 35213 | CTAAGAGGAGATACCA | 84 | 860 |
| 886898 | N/A | N/A | 35648 | 35663 | AATGGGACAGCATCCA | 62 | 861 |
| 886918 | N/A | N/A | 36184 | 36199 | GCTAAAGGGCACTGGA | 73 | 862 |
| 886938 | N/A | N/A | 36597 | 36612 | ATTCAGGCTGCAAGAA | 60 | 863 |
| 886952 | N/A | N/A | 5234 | 5249 | ACTTTTACTCGAAACC | 58 | 864 |

TABLE 21
Percent control of human PMP22 RNA with 3-10-3 cEt gapmers

| | SEQ | SEQ | SEQ | SEQ | | PMP22 | |
|---|---|---|---|---|---|---|---|
| | ID | ID | ID | ID | | (% | |
| | NO: 1 | NO: 1 | NO: 2 | NO: 2 | | UTC) | SEQ |
| Compound | Start | Stop | Start | Stop | Sequence | RTS | ID |
| ID | Site | Site | Site | Site | (5′ to 3′) | 35670 | NO |
| 684394 | 1489 | 1504 | 37852 | 37867 | ATTATTCAGGTCTCCA | 16 | 31 |
| 885432 | 215 | 230 | 7250 | 7265 | CAAGTTCTGCTCAGCG | 42* | 865 |
| 885452 | 252 | 267 | 7287 | 7302 | ACGATGATACTCAGCA | 30* | 866 |
| 885472 | 343 | 358 | 8834 | 8849 | CTGCCAGAGATCAGTT | 42 | 867 |
| 885492 | 507 | 522 | 28480 | 28495 | CTGCCCCCCTTGGTGA | 82 | 868 |
| 885510 | 586 | 601 | 36949 | 36964 | GTGCCTCACCGTGTAG | 61 | 869 |
| 885530 | 616 | 631 | 36979 | 36994 | GGAGTAATCCGAGTTG | 48 | 870 |
| 885550 | 724 | 739 | 37087 | 37102 | ACAGACCGTCTGGGCG | 90 | 871 |
| 885570 | 887 | 902 | 37250 | 37265 | TATAAACCGGAGATAT | 74 | 872 |
| 885590 | 988 | 1003 | 37351 | 37366 | TTCCTTAGCTACTTCT | 45 | 873 |
| 885610 | 1083 | 1098 | 37446 | 37461 | CGAGATGGAGTTATCT | 24 | 874 |
| 885630 | 1197 | 1212 | 37560 | 37575 | GGGTCACCCACCAGAA | 105 | 875 |
| 885650 | 1234 | 1249 | 37597 | 37612 | AGAGGTTCGGGCAGCG | 28 | 876 |
| 885670 | 1305 | 1320 | 37668 | 37683 | ATGCCACAAGCCGTGT | 50 | 877 |
| 885690 | 1344 | 1359 | 37707 | 37722 | TGTGACGAAGATACTC | 47 | 878 |
| 885709 | 1431 | 1446 | 37794 | 37809 | GTTGTTTAGATGATTA | 23 | 879 |
| 885727 | 1543 | 1558 | 37906 | 37921 | AATAGCAGCCTAGCTA | 69 | 880 |
| 885747 | 1637 | 1652 | 38000 | 38015 | CGGTCCCAAGGAGTCT | 148 | 881 |
| 885766 | 1701 | 1716 | 38064 | 38079 | GTCATTGCCAGACAGT | 35 | 882 |
| 885785 | N/A | N/A | 5456 | 5471 | GCGCGCGCGCGAAGCA | 119 | 883 |
| 885805 | N/A | N/A | 5541 | 5556 | TGTCCCGATCCTCAGG | 46 | 884 |
| 885845 | N/A | N/A | 7192 | 7207 | GCACTGGGCCGAGCGA | 132 | 885 |
| 885905 | N/A | N/A | 32745 | 32760 | CTGTTCTTAATCCCGG | 28 | 886 |
| 885925 | N/A | N/A | 2955 | 2970 | ACAAATGCACCATCTC | 43 | 887 |
| 885945 | N/A | N/A | 3875 | 3890 | CCCAAATTGCCACCAC | 49 | 888 |
| 885965 | N/A | N/A | 4720 | 4735 | GCAAAGTGTTCCTGCA | 72 | 889 |
| 886002 | N/A | N/A | 5949 | 5964 | TGAATTAAGCCGATGG | 28 | 890 |
| 886022 | N/A | N/A | 6545 | 6560 | AAAGAATGGCTCGAGA | 97 | 891 |
| 886042 | N/A | N/A | 7114 | 7129 | CGCAGCCCGACCGCCC | 67 | 892 |
| 886062 | N/A | N/A | 7848 | 7863 | TACCAGTGGAAGCTTT | 60 | 893 |
| 886082 | N/A | N/A | 8721 | 8736 | GCCCAGGGATGGCGAA | 75 | 894 |
| 886102 | N/A | N/A | 9323 | 9338 | AGCTAGCCCCACTGTC | 106 | 895 |
| 886122 | N/A | N/A | 9768 | 9783 | ACACATCTTCTGGAAC | 32 | 896 |
| 886142 | N/A | N/A | 10420 | 10435 | CGGGAACTTCAGCCAG | 52 | 897 |
| 886162 | N/A | N/A | 10794 | 10809 | AAATAACCCTAGTGCC | 73 | 898 |
| 886182 | N/A | N/A | 11677 | 11692 | TGTCATGGTCATGCAC | 48 | 899 |
| 886202 | N/A | N/A | 11999 | 12014 | GCCGGAGAGGCACTGG | 53 | 900 |
| 886222 | N/A | N/A | 12694 | 12709 | GGCCGAATGACTATAT | 101 | 901 |

### Example 4: Effect of Modified Oligonucleotides on Human PMP22 RNA In Vitro, Single Dose

[0369] Modified oligonucleotides complementary to a human PMP22 nucleic acid were tested for their effect on PMP22 RNA levels in vitro.

[0370] The modified oligonucleotides in the tables below are 3-10-3 cEt gapmers, as described in Example 1 above. The internucleoside linkages throughout each modified oligonucleotide are phosphorothioate (P═S) linkages. All cytosine residues throughout each modified oligonucleotide are 5-methylcytosines.

[0371] “Start site” indicates the 5′-most nucleoside to which the modified oligonucleotide is complementary in the human gene sequence. “Stop site” indicates the 3′-most nucleoside to which the modified oligonucleotide is complementary in the human gene sequence. Each modified oligonucleotide listed in the Tables below is 100% complementary to SEQ ID NO: 1, SEQ ID NO: 2 and/or SEQ ID NO: 3 (GENBANK Accession No. NM_153321.2). ‘N/A’ indicates that the modified oligonucleotide does not target that particular gene sequence with 100% complementarity.

[0372] Cultured A-549 cells at a density of 15,000 cells per well were treated using electroporation with 4,000 nM of modified oligonucleotide. After a treatment period of approximately 24 hours, total RNA was isolated from the cells and PMP22 RNA levels were measured by quantitative real-time RTPCR. Human PMP22 primer probe set RTS35670 described herein above was used to measure RNA levels. In some cases, an additional human PMP22 primer probe set RTS35667, described herein above, was also used to measure PMP22 RNA levels. PMP22 RNA levels were adjusted according to total RNA content, as measured by RIBOGREEN®. Results are presented in the tables below as percent PMP22 RNA levels relative to untreated control cells. The modified oligonucleotides with percent control values marked with an asterisk (*) are complementary to the amplicon region of the primer probe set. Additional assays may be used to measure the potency and efficacy of the modified oligonucleotides targeting the amplicon region.

TABLE 22
Percent control of human PMP22 RNA with 3-10-3 cEt gapmers

| | SEQ | SEQ | SEQ | SEQ | | PMP22 | |
|---|---|---|---|---|---|---|---|
| | ID | ID | ID | ID | | (% | |
| | NO: 1 | NO: 1 | NO: 2 | NO: 2 | | UTC) | SEQ |
| Compound | Start | Stop | Start | Stop | Sequence | RTS | ID |
| ID | Site | Site | Site | Site | (5′ to 3′) | 35670 | NO |
| 684109 | 16 | 31 | 2659 | 2674 | GAAGCCAGACCAGGCG | 127 | 939 |
| 684113 | 26 | 41 | 2669 | 2684 | CCCTGTAACTGAAGCC | 52 | 940 |
| 684119 | 52 | 67 | 2695 | 2710 | TCCCCGAGATGTTCCC | 18 | 941 |
| 684121 | 60 | 75 | 2703 | 2718 | AACCAGGCTCCCCGAG | 56 | 942 |
| 684123 | 64 | 79 | 2707 | 2722 | TTCCAACCAGGCTCCC | 40 | 943 |
| 684135 | 128 | 143 | 2771 | 2786 | GTTAAGGCAAGACCCT | 65 | 944 |
| 684136 | 132 | 147 | 2775 | 2790 | GGATGTTAAGGCAAGA | 51 | 945 |
| 684143 | 162 | 177 | 2805 | 2820 | CAAGCAGATTTCTTTG | 100* | 946 |
| 684146 | 174 | 189 | 2817 | 2832 | AACCCCTTCTTCCAAG | 45* | 947 |
| 684148 | 196 | 211 | N/A | N/A | TTTCTGCCCGGCCAAA | 30* | 948 |
| 684277 | 905 | 920 | 37268 | 37283 | AGTGTTATAAATAGGT | 23 | 40 |
| 684394 | 1489 | 1504 | 37852 | 37867 | ATTATTCAGGTCTCCA | 5 | 31 |
| 866359 | 22 | 37 | 2665 | 2680 | GTAACTGAAGCCAGAC | 140 | 949 |
| 866362 | 30 | 45 | 2673 | 2688 | TGCTCCCTGTAACTGA | 47 | 950 |
| 866365 | 34 | 49 | 2677 | 2692 | GTGGTGCTCCCTGTAA | 41 | 951 |
| 866368 | 39 | 54 | 2682 | 2697 | CCCTGGTGGTGCTCCC | 15 | 952 |
| 866372 | 44 | 59 | 2687 | 2702 | ATGTTCCCTGGTGGTG | 67 | 953 |
| 866375 | 48 | 63 | 2691 | 2706 | CGAGATGTTCCCTGGT | 40 | 954 |
| 866382 | 56 | 71 | 2699 | 2714 | AGGCTCCCCGAGATGT | 41 | 955 |
| 866389 | 69 | 84 | 2712 | 2727 | GCAGCTTCCAACCAGG | 51 | 956 |
| 866392 | 76 | 91 | 2719 | 2734 | TAAGCCTGCAGCTTCC | 88 | 957 |
| 866395 | 80 | 95 | 2723 | 2738 | AGACTAAGCCTGCAGC | 57 | 958 |
| 866398 | 84 | 99 | 2727 | 2742 | CGACAGACTAAGCCTG | 70 | 959 |
| 866401 | 88 | 103 | 2731 | 2746 | CAGCCGACAGACTAAG | 85 | 960 |
| 866405 | 92 | 107 | 2735 | 2750 | CCCGCAGCCGACAGAC | 28 | 961 |
| 866408 | 96 | 111 | 2739 | 2754 | GAGACCCGCAGCCGAC | 25 | 962 |
| 866410 | 100 | 115 | 2743 | 2758 | GTCAGAGACCCGCAGC | 32 | 963 |
| 866412 | 104 | 119 | 2747 | 2762 | GGCAGTCAGAGACCCG | 34 | 964 |
| 866420 | 136 | 151 | 2779 | 2794 | CAAGGGATGTTAAGGC | 34 | 965 |
| 866423 | 140 | 155 | 2783 | 2798 | AATGCAAGGGATGTTA | 50 | 966 |
| 866426 | 145 | 160 | 2788 | 2803 | AGCCAAATGCAAGGGA | 44 | 967 |
| 866432 | 192 | 207 | N/A | N/A | TGCCCGGCCAAACAGC | 19* | 968 |
| 866439 | 200 | 215 | N/A | N/A | GGAGTTTCTGCCCGGC | 17* | 969 |
| 866442 | 204 | 219 | 7239 | 7254 | CAGCGGAGTTTCTGCC | 81* | 970 |
| 866445 | N/A | N/A | 2844 | 2859 | AATAAAACTCACCCGG | 105* | 971 |
| 866449 | N/A | N/A | 2864 | 2879 | ACCCAGAGGCACAGTT | 80 | 972 |
| 866453 | N/A | N/A | 2884 | 2899 | GTAAAGCATAGGCACA | 31 | 973 |
| 866457 | N/A | N/A | 2899 | 2914 | AATTAGGCAATTCTTG | 72 | 974 |
| 866461 | N/A | N/A | 2972 | 2987 | CTCCAGTCAATTCCAA | 49 | 975 |
| 866465 | N/A | N/A | 3005 | 3020 | CTTTTAACCAAGGATA | 72 | 976 |
| 866469 | N/A | N/A | 3110 | 3125 | GGGAAAAAGCATCTAG | 116 | 977 |
| 866473 | N/A | N/A | 3168 | 3183 | CCCTAACCTGCTTACC | 67 | 978 |
| 866477 | N/A | N/A | 3316 | 3331 | GTAAACCCAACCCATC | 55 | 979 |
| 866481 | N/A | N/A | 3332 | 3347 | ATATACTGCCAGACAG | 72 | 980 |
| 866485 | N/A | N/A | 3364 | 3379 | TAATCAATAACCACCC | 62 | 981 |
| 866489 | N/A | N/A | 3413 | 3428 | ATATTGGGTGCTACAG | 42 | 982 |
| 866493 | N/A | N/A | 3447 | 3462 | TAATAAAGTCTAATAC | 86 | 983 |
| 866497 | N/A | N/A | 3504 | 3519 | AGCATATCTAACTCAG | 19 | 984 |
| 866501 | N/A | N/A | 3529 | 3544 | TCTAAGTAAGCACTTT | 39 | 985 |
| 866505 | N/A | N/A | 3549 | 3564 | CACAACATACTCAGGA | 39 | 986 |
| 866509 | N/A | N/A | 3563 | 3578 | AACACTTATGTGATCA | 20 | 987 |
| 866513 | N/A | N/A | 3644 | 3659 | CCACAGGTCATTTTAT | 70 | 988 |
| 866517 | N/A | N/A | 3672 | 3687 | CTAAAGACATGGCAGT | 52 | 989 |
| 866521 | N/A | N/A | 3801 | 3816 | TGCACTAAAGTAGCTT | 84 | 990 |
| 866525 | N/A | N/A | 3874 | 3889 | CCAAATTGCCACCACT | 87 | 991 |
| 866529 | N/A | N/A | 3895 | 3910 | AACATAATAAGGGCCC | 101 | 992 |
| 866533 | N/A | N/A | 3992 | 4007 | TTCTCAGGTGCAAAAG | 24 | 993 |
| 866537 | N/A | N/A | 4058 | 4073 | ACCTAATCACCCTGCT | 33 | 994 |
| 866541 | N/A | N/A | 4126 | 4141 | TTATATGCATGGTCTG | 21 | 995 |
| 866545 | N/A | N/A | 4266 | 4281 | ACGGTAAGTAAAAATA | 104 | 996 |
| 866549 | N/A | N/A | 4287 | 4302 | TTTAGCTAATTGTATA | 77 | 997 |
| 866553 | N/A | N/A | 4315 | 4330 | TATTTTACGATTTGAA | 76 | 998 |
| 866557 | N/A | N/A | 4359 | 4374 | GTCATAGAAGCTCATC | 19 | 999 |
| 866561 | N/A | N/A | 4489 | 4504 | GGCCAGCCTTGAGGCA | 148 | 1000 |
| 866565 | N/A | N/A | 4562 | 4577 | TTACAGGGAGAGAGGC | 62 | 1001 |
| 866569 | N/A | N/A | 4709 | 4724 | CTGCAGCAGTCGGGCT | 79 | 1002 |
| 866573 | N/A | N/A | 4737 | 4752 | CACCGAATAAGCTCTA | 55 | 1003 |
| 866577 | N/A | N/A | 4754 | 4769 | AGGCAAAACCAGACTA | 85 | 1004 |
| 866581 | N/A | N/A | 4815 | 4830 | GGGAAGAAAAGTCCGG | 93 | 1005 |
| 866585 | N/A | N/A | 4875 | 4890 | TGCCAGCTTCCTAGGA | 103 | 1006 |
| 866589 | N/A | N/A | 4902 | 4917 | GCTATTACTGTCTGCA | 53 | 1007 |
| 866593 | N/A | N/A | 5018 | 5033 | CTAATAGAGGGCAGCG | 56 | 1008 |
| 866597 | N/A | N/A | 5112 | 5127 | GCCAAATGTAGCTCAG | 55 | 1009 |
| 866601 | N/A | N/A | 5222 | 5237 | AACCAGAGGCGGCTGA | 76 | 1010 |
| 866605 | N/A | N/A | 5238 | 5253 | GGCGACTTTTACTCGA | 40 | 1011 |
| 866609 | N/A | N/A | 5250 | 5265 | CTGCAAAACCGCGGCG | 78 | 1012 |
| 866613 | N/A | N/A | 5267 | 5282 | CAAGAAAAAGTCGGTC | 80 | 1013 |
| 866617 | N/A | N/A | 5281 | 5296 | CCTTAAATGCGCCTCA | 76 | 1014 |
| 866621 | N/A | N/A | 5301 | 5316 | GGCAGGAGACAGTCAC | 30 | 1015 |

TABLE 23
Percent control of human PMP22 RNA with 3-10-3 cEt gapmers

| | SEQ | SEQ | SEQ | SEQ | | | | |
|---|---|---|---|---|---|---|---|---|
| | ID | ID | ID | ID | | | | |
| | NO: | NO: | NO: | NO: | | | | |
| | 1 | 1 | 2 | 2 | | PMP22 | PMP22 | SEQ |
| Compound | Start | Stop | Start | Stop | Sequence | (% UTC) | (% UTC) | ID |
| ID | Site | Site | Site | Site | (5′ to 3′) | RTS35670 | RTS35667 | NO |
| 684394 | 1489 | 1504 | 37852 | 37867 | ATTATTCAGGTCTCCA | 7 | 12 | 31 |
| 684394 | 1489 | 1504 | 37852 | 37867 | ATTATTCAGGTCTCCA | 8 | 16 | 31 |
| 885433 | 217 | 232 | 7252 | 7267 | GGCAAGTTCTGCTCAG | 22* | 10 | 1016 |
| 885453 | 254 | 269 | 7289 | 7304 | GGACGATGATACTCAG | 8* | 47 | 1017 |
| 885473 | 352 | 367 | 8843 | 8858 | GCTACAGTTCTGCCAG | 30 | 42 | 1018 |
| 885493 | 508 | 523 | 28481 | 28496 | CCTGCCCCCCTTGGTG | 83 | 54 | 1019 |
| 885511 | 588 | 603 | 36951 | 36966 | GGGTGCCTCACCGTGT | 36 | 66 | 1020 |
| 885531 | 617 | 632 | 36980 | 36995 | AGGAGTAATCCGAGTT | 75 | 59 | 1021 |
| 885551 | 725 | 740 | 37088 | 37103 | GACAGACCGTCTGGGC | 85 | 76 | 1022 |
| 885571 | 888 | 903 | 37251 | 37266 | TTATAAACCGGAGATA | 68 | 83 | 1023 |
| 885591 | 989 | 1004 | 37352 | 37367 | GTTCCTTAGCTACTTC | 31 | 42 | 1024 |
| 885611 | 1084 | 1099 | 37447 | 37462 | GCGAGATGGAGTTATC | 37 | 62 | 1025 |
| 885631 | 1198 | 1213 | 37561 | 37576 | TGGGTCACCCACCAGA | 72 | 84 | 1026 |
| 885651 | 1237 | 1252 | 37600 | 37615 | CACAGAGGTTCGGGCA | 33 | 44 | 1027 |
| 885671 | 1307 | 1322 | 37670 | 37685 | CAATGCCACAAGCCGT | 35 | 57 | 1028 |
| 885691 | 1345 | 1360 | 37708 | 37723 | GTGTGACGAAGATACT | 37 | 43 | 1029 |
| 885710 | 1433 | 1448 | 37796 | 37811 | GAGTTGTTTAGATGAT | 18 | 19 | 1030 |
| 885728 | 1545 | 1560 | 37908 | 37923 | ATAATAGCAGCCTAGC | 55 | 54 | 1031 |
| 885748 | 1638 | 1653 | 38001 | 38016 | ACGGTCCCAAGGAGTC | 151 | 94 | 1032 |
| 885767 | 1703 | 1718 | 38066 | 38081 | AAGTCATTGCCAGACA | 62 | 50 | 1033 |
| 885786 | N/A | N/A | 5458 | 5473 | CTGCGCGCGCGCGAAG | 120 | 93 | 1034 |
| 885806 | N/A | N/A | 5542 | 5557 | CTGTCCCGATCCTCAG | 86 | 14* | 1035 |
| 885846 | N/A | N/A | 7193 | 7208 | CGCACTGGGCCGAGCG | 94 | 91 | 1036 |
| 885906 | N/A | N/A | 32746 | 32761 | TCTGTTCTTAATCCCG | 17 | 25 | 1037 |
| 885926 | N/A | N/A | 3019 | 3034 | GAGTATATATCCACCT | 35 | 69 | 1038 |
| 885946 | N/A | N/A | 3890 | 3905 | AATAAGGGCCCAGTGC | 86 | 105 | 1039 |
| 885966 | N/A | N/A | 4735 | 4750 | CCGAATAAGCTCTAGG | 51 | 83 | 1040 |
| 885983 | N/A | N/A | 5264 | 5279 | GAAAAAGTCGGTCCCT | 94 | 104 | 1041 |
| 886003 | N/A | N/A | 6060 | 6075 | AAGTACCCAATCCCAG | 48 | 73 | 1042 |
| 886023 | N/A | N/A | 6570 | 6585 | GCAGAGCCAGAGTAGT | 128 | 88 | 1043 |
| 886043 | N/A | N/A | 7141 | 7156 | GCGGAAGGCCCGGCCT | 62 | 100 | 1044 |
| 886063 | N/A | N/A | 7870 | 7885 | AGTTACTCTGATGGCC | 59 | 50 | 1045 |
| 886083 | N/A | N/A | 8779 | 8794 | GATAGATATCCTGAGT | 124 | 108 | 1046 |
| 886103 | N/A | N/A | 9338 | 9353 | ACTGACGGTGCAGTGA | 59 | 75 | 1047 |
| 886123 | N/A | N/A | 9812 | 9827 | GTTAGGAAAGCTCTGC | 19 | 20 | 1048 |
| 886143 | N/A | N/A | 10425 | 10440 | TGCTCCGGGAACTTCA | 71 | 74 | 1049 |
| 886163 | N/A | N/A | 10877 | 10892 | ACTAAGGAGGCATTGT | 61 | 80 | 1050 |
| 886183 | N/A | N/A | 11702 | 11717 | TGGCAACCCCCAGAGA | 92 | 88 | 1051 |
| 886203 | N/A | N/A | 12022 | 12037 | TTCCAGATCCTTGTAT | 74 | 91 | 1052 |
| 886223 | N/A | N/A | 12700 | 12715 | CCCCAAGGCCGAATGA | 65 | 81 | 1053 |
| 886243 | N/A | N/A | 13610 | 13625 | AGGCATTGGAACAATG | 68 | 55 | 1054 |
| 886263 | N/A | N/A | 14125 | 14140 | TTCTTACCATTGCCCC | 38 | 50 | 1055 |
| 886283 | N/A | N/A | 14509 | 14524 | GCCTTATAGAGGCTTC | 76 | 91 | 1056 |
| 886303 | N/A | N/A | 15430 | 15445 | TGCCCTTAGACAATGG | 93 | 67 | 1057 |
| 886322 | N/A | N/A | 16117 | 16132 | GACTATAGATTCCAGG | 27 | 30 | 1058 |
| 886342 | N/A | N/A | 16792 | 16807 | TCTAAATCTCAGACCA | 32 | 39 | 1059 |
| 886362 | N/A | N/A | 17583 | 17598 | ACAACATTGAATACCC | 45 | 37 | 1060 |
| 886382 | N/A | N/A | 18606 | 18621 | GGCAGACCCGGTGCAG | 53 | 69 | 1061 |
| 886402 | N/A | N/A | 19000 | 19015 | CTTCAGGTTTAGGAGG | 78 | 73 | 1062 |
| 886422 | N/A | N/A | 19498 | 19513 | CTGCACTTTGACATCC | 25 | 30 | 1063 |
| 886441 | N/A | N/A | 19909 | 19924 | CCCATATGCTTCGCCC | 46 | 44 | 1064 |
| 886461 | N/A | N/A | 20441 | 20456 | GGTCAGATTCCTGCTG | 53 | 55 | 1065 |
| 886481 | N/A | N/A | 21420 | 21435 | ATTAACACAAGCCCCA | 84 | 77 | 1066 |
| 886500 | N/A | N/A | 22294 | 22309 | GGTCACACCAAGCAGT | 46 | 66 | 1067 |
| 886520 | N/A | N/A | 22999 | 23014 | GGCTAGTGGAATTCTG | 79 | 70 | 1068 |
| 886540 | N/A | N/A | 23722 | 23737 | TGGATAATATCAGCAG | 23 | 31 | 1069 |
| 886560 | N/A | N/A | 24934 | 24949 | GTATACACTTCTAAGC | 72 | 64 | 1070 |
| 886580 | N/A | N/A | 26103 | 26118 | TTCAACCATAAGCACA | 41 | 53 | 1071 |
| 886600 | N/A | N/A | 26882 | 26897 | GCCAAATCTAAGAGGC | 109 | 82 | 1072 |
| 886620 | N/A | N/A | 27487 | 27502 | GGCTTACACTTCCTTA | 72 | 59 | 1073 |
| 886640 | N/A | N/A | 28305 | 28320 | GGCCTGAAGGGCCATG | 111 | 90 | 1074 |
| 886660 | N/A | N/A | 28933 | 28948 | TCTTAGCACATCAGGG | 61 | 59 | 1075 |
| 886680 | N/A | N/A | 29343 | 29358 | GATGCTAGGCAGAATG | 42 | 53 | 1076 |
| 886700 | N/A | N/A | 29859 | 29874 | AGCCAGCAACCATCCA | 124 | 112 | 1077 |
| 886720 | N/A | N/A | 30611 | 30626 | GAAGATGAAGGTACTG | 31 | 37 | 1078 |
| 886740 | N/A | N/A | 31110 | 31125 | GACCAACTCTCAGATG | 63 | 69 | 1079 |
| 886760 | N/A | N/A | 31493 | 31508 | GTGCATTGGAGAGGCA | 57 | 82 | 1080 |
| 886780 | N/A | N/A | 32311 | 32326 | ACCTAGGCAGTGGATC | 74 | 73 | 1081 |
| 886800 | N/A | N/A | 33289 | 33304 | CCATAATCATCCGTCC | 39 | 42 | 1082 |
| 886820 | N/A | N/A | 33718 | 33733 | GGGAATAGAGCTTCAA | 191 | 91 | 1083 |
| 886840 | N/A | N/A | 34220 | 34235 | CGATGGAATTTCGAGA | 57 | 49 | 1084 |
| 886860 | N/A | N/A | 34753 | 34768 | GGCAAGGGTAAGTGAG | 39 | 49 | 1085 |
| 886880 | N/A | N/A | 35220 | 35235 | AGCTACTCCCCGATTT | 108 | 90 | 1086 |
| 886900 | N/A | N/A | 35666 | 35681 | CAATAGTCTTGGAACC | 50 | 54 | 1087 |
| 886920 | N/A | N/A | 36238 | 36253 | AGGCAAGCTCCATTTC | 59 | 89 | 1088 |
| 886940 | N/A | N/A | 36621 | 36636 | GGCCACACTACATGGC | 115 | 128 | 1089 |

TABLE 24
Percent control of human PMP22 RNA with 3-10-3
cEt gapmers

| | SEQ | SEQ | SEQ | SEQ | | | |
|---|---|---|---|---|---|---|---|
| | ID | ID | ID | ID | | | |
| | NO: 1 | NO: 1 | NO: 2 | NO: 2 | | PMP22 | SEQ |
| Compound | Start | Stop | Start | Stop | Sequence | (% UTC) | ID |
| ID | Site | Site | Site | Site | (5′ to 3′) | RTS35760 | NO |
| 684223 | 563 | 578 | 36926 | 36941 | CAGCACTCATCACGCA | 42 | 1090 |
| 684394 | 1489 | 1504 | 37852 | 37867 | ATTATTCAGGTCTCCA | 21 | 31 |
| 684394 | 1489 | 1504 | 37852 | 37867 | ATTATTCAGGTCTCCA | 16 | 31 |
| 885436 | 220 | 235 | 7255 | 7270 | GGCGGCAAGTTCTGCT | 89* | 1091 |
| 885456 | 258 | 273 | 7293 | 7308 | TGGAGGACGATGATAC | 10* | 1092 |
| 885476 | 356 | 371 | 8847 | 8862 | AGGTGCTACAGTTCTG | 28 | 1093 |
| 885514 | 592 | 607 | 36955 | 36970 | CTCCGGGTGCCTCACC | 55 | 1094 |
| 885534 | 621 | 636 | 36984 | 36999 | CCGTAGGAGTAATCCG | 78 | 1095 |
| 885554 | 731 | 746 | 37094 | 37109 | GCCTCAGACAGACCGT | 111 | 1096 |
| 885574 | 892 | 907 | 37255 | 37270 | GGTTTTATAAACCGGA | 33 | 1097 |
| 885594 | 993 | 1008 | 37356 | 37371 | TAAAGTTCCTTAGCTA | 58 | 1098 |
| 885614 | 1115 | 1130 | 37478 | 37493 | GAGGTATCTTCTTTCA | 55 | 1099 |
| 885634 | 1207 | 1222 | 37570 | 37585 | TGGATGCACTGGGTCA | 46 | 1100 |
| 885654 | 1249 | 1264 | 37612 | 37627 | CGTAAAGCTTCACACA | 104 | 1101 |
| 885674 | 1316 | 1331 | 37679 | 37694 | CAAGTATGCCAATGCC | 36 | 1102 |
| 885694 | 1348 | 1363 | 37711 | 37726 | GATGTGTGACGAAGAT | 37 | 1103 |
| 885713 | 1438 | 1453 | 37801 | 37816 | CCAGTGAGTTGTTTAG | 44 | 1104 |
| 885731 | 1583 | 1598 | 37946 | 37961 | GGGAGTGATGAAGGCT | 60 | 1105 |
| 885751 | 1641 | 1656 | 38004 | 38019 | CTCACGGTCCCAAGGA | 80 | 1106 |
| 885770 | 1707 | 1722 | 38070 | 38085 | ATACAAGTCATTGCCA | 70 | 1107 |
| 885789 | N/A | N/A | 5477 | 5492 | CCAAAGCTGCGCTGCG | 170 | 1108 |
| 885809 | N/A | N/A | 5546 | 5561 | ACAGCTGTCCCGATCC | 41 | 1109 |
| 885829 | N/A | N/A | 7172 | 7187 | GGCGCGCGCAGAGGGA | 64 | 1110 |
| 885849 | N/A | N/A | 7198 | 7213 | CCGAACGCACTGGGCC | 165 | 1111 |
| 885909 | N/A | N/A | 32838 | 32853 | GCTATATTGATCTTTC | 38 | 1112 |
| 885929 | N/A | N/A | 3074 | 3089 | CTGGATGCATTAGGGT | 24 | 1113 |
| 885949 | N/A | N/A | 4089 | 4104 | GGTTAGGCACTCTGGC | 39 | 1114 |
| 885969 | N/A | N/A | 4758 | 4773 | GCCTAGGCAAAACCAG | 93 | 1115 |
| 885986 | N/A | N/A | 5408 | 5423 | TTAACGGGAACAACGC | 111 | 1116 |
| 886006 | N/A | N/A | 6165 | 6180 | TGTTAGAGGACATGCA | 76 | 1117 |
| 886026 | N/A | N/A | 6611 | 6626 | GCTCAGCCTCGCGCAG | 75 | 1118 |
| 886046 | N/A | N/A | 7350 | 7365 | CGCCAGGCACTCACGC | 86 | 1119 |
| 886066 | N/A | N/A | 7993 | 8008 | CTTACAATGTGCCTTA | 59 | 1120 |
| 886086 | N/A | N/A | 8898 | 8913 | CCTCACCGTTTGGTGA | 93 | 1121 |
| 886106 | N/A | N/A | 9435 | 9450 | CCCCATCTTGCAACAA | 46 | 1122 |
| 886126 | N/A | N/A | 9870 | 9885 | TATGAGTAGCTCCAGC | 43 | 1123 |
| 886146 | N/A | N/A | 10456 | 10471 | CAGTAGCGAGTACGGA | 19 | 1124 |
| 886166 | N/A | N/A | 10908 | 10923 | CGGAAAGCAACGAGGC | 37 | 1125 |
| 886186 | N/A | N/A | 11745 | 11760 | GCACGATGCCAGGAGG | 45 | 1126 |
| 886206 | N/A | N/A | 12058 | 12073 | GACCAGGCTCGGGACC | 44 | 1127 |
| 886226 | N/A | N/A | 12772 | 12787 | GAAAGTATTCCACACC | 32 | 1128 |
| 886246 | N/A | N/A | 13645 | 13660 | CAAACGAGGAAGCAGC | 48 | 1129 |
| 886266 | N/A | N/A | 14212 | 14227 | TCATATGGCTGGCTCC | 31 | 1130 |
| 886286 | N/A | N/A | 14591 | 14606 | AGTGATAAGAATCCCG | 48 | 1131 |
| 886325 | N/A | N/A | 16228 | 16243 | ATCCACAACCTCAGGC | 46 | 1132 |
| 886345 | N/A | N/A | 16975 | 16990 | CAATGATGTCCCAACT | 118 | 1133 |
| 886365 | N/A | N/A | 17664 | 17679 | GCCCAAGACTTAGCTC | 68 | 1134 |
| 886385 | N/A | N/A | 18679 | 18694 | CAGGTCCTACCTCAAT | 67 | 1135 |
| 886405 | N/A | N/A | 19065 | 19080 | GCAATTGCAGTCATGA | 132 | 1136 |
| 886425 | N/A | N/A | 19553 | 19568 | TTCCTAATTAAGAGGC | 57 | 1137 |
| 886444 | N/A | N/A | 19976 | 19991 | GTATGAATGTCATTCC | 20 | 1138 |
| 886464 | N/A | N/A | 20489 | 20504 | GCAGATAGTGGGAAGC | 63 | 1139 |
| 886484 | N/A | N/A | 21466 | 21481 | GATCAAACCTAGTGTG | 127 | 1140 |
| 886503 | N/A | N/A | 22405 | 22420 | GTTAAAGGATAGTGCA | 46 | 1141 |
| 886523 | N/A | N/A | 23052 | 23067 | ACAGATGCAGCACTCT | 9 | 1142 |
| 886543 | N/A | N/A | 23827 | 23842 | CGTAAAAGGTGCCCAA | 61 | 1143 |
| 886563 | N/A | N/A | 25143 | 25158 | GGCTCAACATATACCT | 77 | 1144 |
| 886583 | N/A | N/A | 26171 | 26186 | TGAATACCTACTGCTT | 60 | 1145 |
| 886603 | N/A | N/A | 26908 | 26923 | GTGTTTTCATGAGCCC | 18 | 1146 |
| 886623 | N/A | N/A | 27510 | 27525 | CGCCAACCACCAGACG | 66 | 1147 |
| 886643 | N/A | N/A | 28532 | 28547 | TACCATCCACAACTTA | 126 | 1148 |
| 886663 | N/A | N/A | 28958 | 28973 | CATACCTGATAACTAC | 77 | 1149 |
| 886683 | N/A | N/A | 29381 | 29396 | CAGTAAGTCAACAGAC | 69 | 1150 |
| 886703 | N/A | N/A | 29971 | 29986 | CCCCAGAATATGTTAC | 68 | 1151 |
| 886723 | N/A | N/A | 30679 | 30694 | GATGTAATGATGTTGC | 18 | 1152 |
| 886743 | N/A | N/A | 31154 | 31169 | AGCCATTTCCAGTGCA | 60 | 1153 |
| 886763 | N/A | N/A | 31548 | 31563 | AGCCACTTCCGGAGAC | 50 | 1154 |
| 886783 | N/A | N/A | 32372 | 32387 | GGATTAGGGACAGTTT | 41 | 1155 |
| 886803 | N/A | N/A | 33336 | 33351 | AGCCACCCATAGCATT | 72 | 1156 |
| 886823 | N/A | N/A | 33822 | 33837 | CAGTAGAAGGCTGGCT | 70 | 1157 |
| 886843 | N/A | N/A | 34301 | 34316 | CCAAGATAAGTGAGAC | 47 | 1158 |
| 886863 | N/A | N/A | 34831 | 34846 | GCCAAATACCCCTAGT | 49 | 1159 |
| 886883 | N/A | N/A | 35280 | 35295 | TCCCAAATGGGCTGTC | 83 | 1160 |
| 886903 | N/A | N/A | 35700 | 35715 | TGCCACTTGACTGGCC | 106 | 1161 |
| 886923 | N/A | N/A | 36285 | 36300 | CGACAGTATGACTGGG | 79 | 1162 |
| 886943 | N/A | N/A | 36702 | 36717 | GGCCACCTAGGCCTTA | 125 | 1163 |
| 886955 | N/A | N/A | 15620 | 15635 | CACAACCTATTGATAG | 82 | 1164 |

TABLE 25
Percent control of human PMP22 RNA with 3-10-3
cEt gapmers

| | SEQ | SEQ | SEQ | SEQ | | | |
|---|---|---|---|---|---|---|---|
| | ID | ID | ID | ID | | | |
| | NO: 1 | NO: 1 | NO: 2 | NO: 2 | | PMP22 | SEQ |
| Compound | Start | Stop | Start | Stop | Sequence | (% UTC) | ID |
| ID | Site | Site | Site | Site | (5′ to 3′) | RTS35670 | NO |
| 684383 | 1439 | 1454 | 37802 | 37817 | TCCAGTGAGTTGTTTA | 37 | 1165 |
| 684394 | 1489 | 1504 | 37852 | 37867 | ATTATTCAGGTCTCCA | 24 | 31 |
| 684394 | 1489 | 1504 | 37852 | 37867 | ATTATTCAGGTCTCCA | 23 | 31 |
| 885437 | 222 | 237 | 7257 | 7272 | CTGGCGGCAAGTTCTG | 29* | 1166 |
| 885457 | 275 | 290 | 7310 | 7325 | GCACCAGCACCGCGAC | 30* | 1167 |
| 885477 | 357 | 372 | 8848 | 8863 | GAGGTGCTACAGTTCT | 30 | 1168 |
| 885496 | 565 | 580 | 36928 | 36943 | CGCAGCACTCATCACG | 88 | 1169 |
| 885515 | 593 | 608 | 36956 | 36971 | ACTCCGGGTGCCTCAC | 40 | 1170 |
| 885535 | 622 | 637 | 36985 | 37000 | ACCGTAGGAGTAATCC | 48 | 1171 |
| 885555 | 745 | 760 | 37108 | 37123 | TATGTACGCTCAGAGC | 80 | 1172 |
| 885575 | 894 | 909 | 37257 | 37272 | TAGGTTTTATAAACCG | 82 | 1173 |
| 885595 | 994 | 1009 | 37357 | 37372 | GTAAAGTTCCTTAGCT | 46 | 1174 |
| 885615 | 1117 | 1132 | 37480 | 37495 | GGGAGGTATCTTCTTT | 82 | 1175 |
| 885635 | 1209 | 1224 | 37572 | 37587 | GTTGGATGCACTGGGT | 75 | 1176 |
| 885655 | 1264 | 1279 | 37627 | 37642 | TTTTGTCCGTGTGCGC | 48 | 1177 |
| 885675 | 1317 | 1332 | 37680 | 37695 | GCAAGTATGCCAATGC | 54 | 1178 |
| 885695 | 1350 | 1365 | 37713 | 37728 | TAGATGTGTGACGAAG | 24 | 1179 |
| 885732 | 1584 | 1599 | 37947 | 37962 | TGGGAGTGATGAAGGC | 32 | 1180 |
| 885752 | 1643 | 1658 | 38006 | 38021 | AACTCACGGTCCCAAG | 68 | 1181 |
| 885771 | 1709 | 1724 | 38072 | 38087 | CAATACAAGTCATTGC | 34 | 1182 |
| 885790 | N/A | N/A | 5478 | 5493 | GCCAAAGCTGCGCTGC | 59 | 1183 |
| 885830 | N/A | N/A | 7173 | 7188 | AGGCGCGCGCAGAGGG | 57 | 1184 |
| 885850 | N/A | N/A | 7199 | 7214 | GCCGAACGCACTGGGC | 76 | 1185 |
| 885890 | N/A | N/A | 32723 | 32738 | CACATTTGACTTGAGT | 36 | 1186 |
| 885910 | N/A | N/A | 32839 | 32854 | AGCTATATTGATCTTT | 55 | 1187 |
| 885930 | N/A | N/A | 3233 | 3248 | TGCTGACCAGGCTTGC | 108 | 1188 |
| 885950 | N/A | N/A | 4156 | 4171 | CCGTTATATGCCAAGC | 13 | 1189 |
| 885970 | N/A | N/A | 4792 | 4807 | CTGGATAGCATGGTCT | 37 | 1190 |
| 885987 | N/A | N/A | 5633 | 5648 | CGCTTTCTGGCACCCT | 39 | 1191 |
| 886007 | N/A | N/A | 6224 | 6239 | AGTAATGCGGTCCTCG | 46 | 1192 |
| 886027 | N/A | N/A | 6630 | 6645 | AGGAACGGTCCTGGCC | 125 | 1193 |
| 886047 | N/A | N/A | 7366 | 7381 | GCGCAGGGAGCCTCCC | 86 | 1194 |
| 886067 | N/A | N/A | 8409 | 8424 | GTGAAGATGCTTGTAA | 51 | 1195 |
| 886087 | N/A | N/A | 8919 | 8934 | GCTCATGGAGCACAAA | 87 | 1196 |
| 886107 | N/A | N/A | 9464 | 9479 | AGCTTAGGGTTTTGCA | 78 | 1197 |
| 886127 | N/A | N/A | 9935 | 9950 | TACTGAACTGGATCTA | 46 | 1198 |
| 886147 | N/A | N/A | 10474 | 10489 | CTTGTAACCACCAGGT | 48 | 1199 |
| 886167 | N/A | N/A | 10916 | 10931 | GGTCCTCACGGAAAGC | 53 | 1200 |
| 886187 | N/A | N/A | 11752 | 11767 | CCTCATGGCACGATGC | 42 | 1201 |
| 886207 | N/A | N/A | 12081 | 12096 | CCATATCTATCTCCTG | 41 | 1202 |
| 886227 | N/A | N/A | 12811 | 12826 | GTATGATTGGGTATGG | 30 | 1203 |
| 886247 | N/A | N/A | 13686 | 13701 | GTTCAGGCAAACTAGT | 77 | 1204 |
| 886267 | N/A | N/A | 14224 | 14239 | TCCCCGAGATGTTCAT | 45 | 1205 |
| 886287 | N/A | N/A | 14712 | 14727 | CCTACTTACTACTCAA | 54 | 1206 |
| 886306 | N/A | N/A | 15645 | 15660 | CCCAAAGCATTGATCT | 41 | 1207 |
| 886326 | N/A | N/A | 16234 | 16249 | ATCAACATCCACAACC | 77 | 1208 |
| 886346 | N/A | N/A | 17034 | 17049 | GCCAGAATGAGCTTAC | 35 | 1209 |
| 886366 | N/A | N/A | 17680 | 17695 | CGTTAACCCCTGGCAT | 53 | 1210 |
| 886386 | N/A | N/A | 18680 | 18695 | TCAGGTCCTACCTCAA | 20 | 1211 |
| 886406 | N/A | N/A | 19080 | 19095 | ACGGGAAAGGCAGTTG | 28 | 1212 |
| 886426 | N/A | N/A | 19566 | 19581 | TCAATGAACTGCATTC | 38 | 1213 |
| 886445 | N/A | N/A | 19977 | 19992 | AGTATGAATGTCATTC | 27 | 1214 |
| 886465 | N/A | N/A | 20494 | 20509 | CCCCAGCAGATAGTGG | 91 | 1215 |
| 886485 | N/A | N/A | 21532 | 21547 | ATGATTCGAGTTCAGA | 25 | 1216 |
| 886504 | N/A | N/A | 22454 | 22469 | TTATTGGGTTGTCATA | 44 | 1217 |
| 886524 | N/A | N/A | 23148 | 23163 | GGTCAAGAAGCCTTTC | 35 | 1218 |
| 886544 | N/A | N/A | 23945 | 23960 | CTCTAGTTCGCATCAT | 49 | 1219 |
| 886564 | N/A | N/A | 25148 | 25163 | ATGTAGGCTCAACATA | 77 | 1220 |
| 886584 | N/A | N/A | 26211 | 26226 | ATTAGAGGATCAAGGA | 62 | 1221 |
| 886604 | N/A | N/A | 26909 | 26924 | GGTGTTTTCATGAGCC | 37 | 1222 |
| 886624 | N/A | N/A | 27516 | 27531 | TGTGATCGCCAACCAC | 44 | 1223 |
| 886644 | N/A | N/A | 28544 | 28559 | CCACATGGACTTTACC | 116 | 1224 |
| 886664 | N/A | N/A | 28965 | 28980 | GAAGACACATACCTGA | 44 | 1225 |
| 886684 | N/A | N/A | 29430 | 29445 | CACTACATCTAGCTCT | 65 | 1226 |
| 886704 | N/A | N/A | 30046 | 30061 | ATCCACTGATGCAATG | 77 | 1227 |
| 886724 | N/A | N/A | 30726 | 30741 | GTGACTTAAGGGTTCT | 34 | 1228 |
| 886744 | N/A | N/A | 31167 | 31182 | GGAAAGATCCTGCAGC | 57 | 1229 |
| 886764 | N/A | N/A | 31567 | 31582 | GAGATAATGCAGCCCT | 27 | 1230 |
| 886784 | N/A | N/A | 32384 | 32399 | AACCTTACAGTGGGAT | 44 | 1231 |
| 886804 | N/A | N/A | 33342 | 33357 | CTAGAAAGCCACCCAT | 89 | 1232 |
| 886824 | N/A | N/A | 33842 | 33857 | TGCTACCCAAATGCAG | 90 | 1233 |
| 886844 | N/A | N/A | 34312 | 34327 | CTCTAGATGTACCAAG | 45 | 1234 |
| 886864 | N/A | N/A | 34856 | 34871 | TGTCATCCAGTAGTCA | 36 | 1235 |
| 886884 | N/A | N/A | 35300 | 35315 | TATCATCATGCAGGCA | 70 | 1236 |
| 886904 | N/A | N/A | 35736 | 35751 | GTTAAGCCTGTCCTCC | 47 | 1237 |
| 886924 | N/A | N/A | 36296 | 36311 | AAGGATGCAGCCGACA | 76 | 1238 |
| 886944 | N/A | N/A | 36763 | 36778 | AAAGGAGGTAGCACAA | 113 | 1239 |

TABLE 26
Percent control of human PMP22 RNA with 3-10-3
cEt gapmers

| | SEQ | SEQ | SEQ | SEQ | | | |
|---|---|---|---|---|---|---|---|
| | ID | ID | ID | ID | | | |
| | NO: 1 | NO: 1 | NO: 2 | NO: 2 | | PMP22 | SEQ |
| Compound | Start | Stop | Start | Stop | Sequence | (% UTC) | ID |
| ID | Site | Site | Site | Site | (5′ to 3′) | RTS35670 | NO |
| 684394 | 1489 | 1504 | 37852 | 37867 | ATTATTCAGGTCTCCA | 20 | 31 |
| 684394 | 1489 | 1504 | 37852 | 37867 | ATTATTCAGGTCTCCA | 20 | 31 |
| 885438 | 223 | 238 | 7258 | 7273 | TCTGGCGGCAAGTTCT | 21* | 1240 |
| 885458 | 286 | 301 | 7321 | 7336 | GACGAACAGCAGCACC | 88 | 1241 |
| 885478 | 358 | 373 | 8849 | 8864 | AGAGGTGCTACAGTTC | 36 | 1242 |
| 885497 | 567 | 582 | 36930 | 36945 | GCCGCAGCACTCATCA | 89 | 1243 |
| 885516 | 595 | 610 | 36958 | 36973 | CCACTCCGGGTGCCTC | 35 | 1244 |
| 885536 | 624 | 639 | 36987 | 37002 | AAACCGTAGGAGTAAT | 88 | 1245 |
| 885556 | 746 | 761 | 37109 | 37124 | CTATGTACGCTCAGAG | 52 | 1246 |
| 885576 | 953 | 968 | 37316 | 37331 | TGATGGTCAACATAAA | 63 | 1247 |
| 885596 | 999 | 1014 | 37362 | 37377 | AGGATGTAAAGTTCCT | 95 | 1248 |
| 885616 | 1119 | 1134 | 37482 | 37497 | GAGGGAGGTATCTTCT | 96 | 1249 |
| 885636 | 1211 | 1226 | 37574 | 37589 | CTGTTGGATGCACTGG | 52 | 1250 |
| 885656 | 1265 | 1280 | 37628 | 37643 | ATTTTGTCCGTGTGCG | 79 | 1251 |
| 885676 | 1320 | 1335 | 37683 | 37698 | AGGGCAAGTATGCCAA | 63 | 1252 |
| 885696 | 1351 | 1366 | 37714 | 37729 | TTAGATGTGTGACGAA | 32 | 1253 |
| 885714 | 1441 | 1456 | 37804 | 37819 | TTTCCAGTGAGTTGTT | 35 | 1254 |
| 885733 | 1599 | 1614 | 37962 | 37977 | ACCGTAAGAAAAATGT | 97 | 1255 |
| 885753 | 1644 | 1659 | 38007 | 38022 | GAACTCACGGTCCCAA | 71 | 1256 |
| 885772 | 1710 | 1725 | 38073 | 38088 | CCAATACAAGTCATTG | 82 | 1257 |
| 885791 | N/A | N/A | 5481 | 5496 | GCCGCCAAAGCTGCGC | 119 | 1258 |
| 885831 | N/A | N/A | 7174 | 7189 | GAGGCGCGCGCAGAGG | 61 | 1259 |
| 885851 | N/A | N/A | 7200 | 7215 | GGCCGAACGCACTGGG | 166 | 1260 |
| 885891 | N/A | N/A | 32724 | 32739 | ACACATTTGACTTGAG | 30 | 1261 |
| 885911 | N/A | N/A | 32840 | 32855 | TAGCTATATTGATCTT | 67 | 1262 |
| 885931 | N/A | N/A | 3318 | 3333 | AGGTAAACCCAACCCA | 83 | 1263 |
| 885951 | N/A | N/A | 4169 | 4184 | GCATTTACAGTGCCCG | 14 | 1264 |
| 885971 | N/A | N/A | 4801 | 4816 | GGCCGACTACTGGATA | 113 | 1265 |
| 885988 | N/A | N/A | 5641 | 5656 | CTGCGCTGCGCTTTCT | 71 | 1266 |
| 886008 | N/A | N/A | 6242 | 6257 | GGCAGGACATTTATCC | 73 | 1267 |
| 886028 | N/A | N/A | 6677 | 6692 | CCGCATTCCGTTTGTC | 131 | 1268 |
| 886048 | N/A | N/A | 7534 | 7549 | CGCTTGGTTCCTATCA | 68 | 1269 |
| 886068 | N/A | N/A | 8419 | 8434 | TGGAGATACTGTGAAG | 68 | 1270 |
| 886088 | N/A | N/A | 8924 | 8939 | GACAAGCTCATGGAGC | 70 | 1271 |
| 886108 | N/A | N/A | 9469 | 9484 | GGCTTAGCTTAGGGTT | 48 | 1272 |
| 886128 | N/A | N/A | 9979 | 9994 | GGATTATGCAAAGCCA | 48 | 1273 |
| 886148 | N/A | N/A | 10479 | 10494 | CACTACTTGTAACCAC | 55 | 1274 |
| 886168 | N/A | N/A | 10992 | 11007 | GTGCAGTGTCCAGATG | 31 | 1275 |
| 886188 | N/A | N/A | 11762 | 11777 | TGTTAGACTGCCTCAT | 84 | 1276 |
| 886208 | N/A | N/A | 12099 | 12114 | AGGGAGTGATTCACCC | 94 | 1277 |
| 886228 | N/A | N/A | 12831 | 12846 | AACTGAGCTATTGCAA | 62 | 1278 |
| 886248 | N/A | N/A | 13693 | 13708 | AGAAAGGGTTCAGGCA | 54 | 1279 |
| 886268 | N/A | N/A | 14225 | 14240 | CTCCCCGAGATGTTCA | 35 | 1280 |
| 886288 | N/A | N/A | 14722 | 14737 | GCAGAGGGAACCTACT | 75 | 1281 |
| 886307 | N/A | N/A | 15721 | 15736 | GCGATGATAGGAGACC | 19 | 1282 |
| 886327 | N/A | N/A | 16290 | 16305 | GACCTGACCACAGTCA | 105 | 1283 |
| 886347 | N/A | N/A | 17108 | 17123 | CTGGACTATGACCACA | 31 | 1284 |
| 886367 | N/A | N/A | 17751 | 17766 | GACAATATCTCCTGGC | 24 | 1285 |
| 886387 | N/A | N/A | 18696 | 18711 | AGGTCCTACCTCAACT | 97 | 1286 |
| 886407 | N/A | N/A | 19092 | 19107 | CCATAGAAAATGACGG | 29 | 1287 |
| 886446 | N/A | N/A | 19978 | 19993 | CAGTATGAATGTCATT | 42 | 1288 |
| 886466 | N/A | N/A | 20509 | 20524 | ACCCAGACCTAGCTCC | 67 | 1289 |
| 886486 | N/A | N/A | 21556 | 21571 | AACAAGTCAGCTGTAC | 82 | 1290 |
| 886505 | N/A | N/A | 22477 | 22492 | CGTACTTGAGGCACTA | 39 | 1291 |
| 886525 | N/A | N/A | 23166 | 23181 | TGCAACGAAGAAGAGT | 65 | 1292 |
| 886545 | N/A | N/A | 23977 | 23992 | GGCTATTCATTTGGTA | 59 | 1293 |
| 886565 | N/A | N/A | 25154 | 25169 | GAAATGATGTAGGCTC | 33 | 1294 |
| 886585 | N/A | N/A | 26263 | 26278 | CCCCATTACAATTGAG | 86 | 1295 |
| 886605 | N/A | N/A | 26910 | 26925 | AGGTGTTTTCATGAGC | 22 | 1296 |
| 886625 | N/A | N/A | 27527 | 27542 | ACAGAGCGGTGTGTGA | 80 | 1297 |
| 886645 | N/A | N/A | 28557 | 28572 | ATGCACCCCGCTTCCA | 49 | 1298 |
| 886665 | N/A | N/A | 28975 | 28990 | CCTATTGGTGGAAGAC | 47 | 1299 |
| 886685 | N/A | N/A | 29453 | 29468 | TGAATTTGGACCACAG | 53 | 1300 |
| 886705 | N/A | N/A | 30052 | 30067 | GGGCATATCCACTGAT | 99 | 1301 |
| 886725 | N/A | N/A | 30731 | 30746 | CATGAGTGACTTAAGG | 44 | 1302 |
| 886745 | N/A | N/A | 31179 | 31194 | CTCAGAATTAGTGGAA | 38 | 1303 |
| 886765 | N/A | N/A | 31572 | 31587 | GTGCAGAGATAATGCA | 84 | 1304 |
| 886785 | N/A | N/A | 32456 | 32471 | GTCCAGACGCAGGATC | 47 | 1305 |
| 886805 | N/A | N/A | 33354 | 33369 | GACCATTGCTGCCTAG | 39 | 1306 |
| 886825 | N/A | N/A | 33854 | 33869 | GCCTACGGAGGATGCT | 81 | 1307 |
| 886845 | N/A | N/A | 34340 | 34355 | TTGCATGCGGGCCCTG | 97 | 1308 |
| 886865 | N/A | N/A | 34870 | 34885 | CCCAAGACAGTTAATG | 77 | 1309 |
| 886885 | N/A | N/A | 35315 | 35330 | GGGCAGGACAACACTT | 161 | 1310 |
| 886905 | N/A | N/A | 35754 | 35769 | CGCCACATGAACCACC | 43 | 1311 |
| 886925 | N/A | N/A | 36359 | 36374 | TGCCTATGGGCACTGC | 114 | 1312 |
| 886945 | N/A | N/A | 36829 | 36844 | GACAATTGCTGGGTAG | 38 | 1313 |
| 886956 | N/A | N/A | 19586 | 19601 | GCTAACTTTGATACAG | 71 | 1314 |

TABLE 27
Percent control of human PMP22 RNA with 3-10-3
cEt gapmers

| | SEQ | SEQ | SEQ | SEQ | | | |
|---|---|---|---|---|---|---|---|
| | ID | ID | ID | ID | | | |
| | NO: 1 | NO: 1 | NO: 2 | NO: 2 | | PMP22 | SEQ |
| Compound | Start | Stop | Start | Stop | Sequence | (% UTC) | ID |
| ID | Site | Site | Site | Site | (5′ to 3′) | RTS35670 | NO |
| 684394 | 1489 | 1504 | 37852 | 37867 | ATTATTCAGGTCTCCA | 11 | 31 |
| 684394 | 1489 | 1504 | 37852 | 37867 | ATTATTCAGGTCTCCA | 19 | 31 |
| 885439 | 224 | 239 | 7259 | 7274 | TTCTGGCGGCAAGTTC | 19* | 1315 |
| 885459 | 288 | 303 | 7323 | 7338 | GAGACGAACAGCAGCA | 107 | 1316 |
| 885479 | 359 | 374 | 8850 | 8865 | AAGAGGTGCTACAGTT | 47 | 1317 |
| 885498 | 568 | 583 | 36931 | 36946 | GGCCGCAGCACTCATC | 102 | 1318 |
| 885517 | 596 | 611 | 36959 | 36974 | GCCACTCCGGGTGCCT | 58 | 1319 |
| 885537 | 625 | 640 | 36988 | 37003 | GAAACCGTAGGAGTAA | 51 | 1320 |
| 885557 | 747 | 762 | 37110 | 37125 | CCTATGTACGCTCAGA | 36 | 1321 |
| 885577 | 956 | 971 | 37319 | 37334 | GGCTGATGGTCAACAT | 31 | 1322 |
| 885597 | 1001 | 1016 | 37364 | 37379 | TTAGGATGTAAAGTTC | 39 | 1323 |
| 885617 | 1120 | 1135 | 37483 | 37498 | GGAGGGAGGTATCTTC | 139 | 1324 |
| 885637 | 1212 | 1227 | 37575 | 37590 | TCTGTTGGATGCACTG | 76 | 1325 |
| 885657 | 1286 | 1301 | 37649 | 37664 | TGCAAGGGCTCCAGTT | 103 | 1326 |
| 885677 | 1321 | 1336 | 37684 | 37699 | AAGGGCAAGTATGCCA | 46 | 1327 |
| 885697 | 1353 | 1368 | 37716 | 37731 | ATTTAGATGTGTGACG | 45 | 1328 |
| 885715 | 1472 | 1487 | 37835 | 37850 | TCTATCTTATGTTGTA | 31 | 1329 |
| 885734 | 1601 | 1616 | 37964 | 37979 | CGACCGTAAGAAAAAT | 93 | 1330 |
| 885754 | 1645 | 1660 | 38008 | 38023 | GGAACTCACGGTCCCA | 93 | 1331 |
| 885773 | 1740 | 1755 | 38103 | 38118 | GGGCACCATATATACA | 94 | 1332 |
| 885792 | N/A | N/A | 5482 | 5497 | CGCCGCCAAAGCTGCG | 99 | 1333 |
| 885832 | N/A | N/A | 7175 | 7190 | GGAGGCGCGCGCAGAG | 99 | 1334 |
| 885852 | N/A | N/A | 7202 | 7217 | GAGGCCGAACGCACTG | 80 | 1335 |
| 885892 | N/A | N/A | 32732 | 32747 | CGGTAACCACACATTT | 66 | 1336 |
| 885912 | N/A | N/A | 32843 | 32858 | CTATAGCTATATTGAT | 78 | 1337 |
| 885932 | N/A | N/A | 3326 | 3341 | TGCCAGACAGGTAAAC | 37 | 1338 |
| 885952 | N/A | N/A | 4357 | 4372 | CATAGAAGCTCATCAC | 47 | 1339 |
| 885972 | N/A | N/A | 4847 | 4862 | GATCTAGCGGGCTCCT | 87 | 1340 |
| 885989 | N/A | N/A | 5656 | 5671 | GCCAAAGCCCCGCGCC | 98 | 1341 |
| 886009 | N/A | N/A | 6260 | 6275 | TTTCAGCCGGTCAGAG | 124 | 1342 |
| 886029 | N/A | N/A | 6713 | 6728 | CGGCGAGGAGGCTGGT | 58 | 1343 |
| 886049 | N/A | N/A | 7553 | 7568 | GCTAACCCAGCCCAGC | 88 | 1344 |
| 886069 | N/A | N/A | 8446 | 8461 | GTCTGATATCATCATC | 36 | 1345 |
| 886089 | N/A | N/A | 9000 | 9015 | GCAACGACATTCTGGC | 16 | 1346 |
| 886109 | N/A | N/A | 9474 | 9489 | CCCAAGGCTTAGCTTA | 67 | 1347 |
| 886129 | N/A | N/A | 9985 | 10000 | GCAACTGGATTATGCA | 89 | 1348 |
| 886149 | N/A | N/A | 10496 | 10511 | CCCTTTTCGGGCTGAG | 79 | 1349 |
| 886169 | N/A | N/A | 10999 | 11014 | TGTTCAGGTGCAGTGT | 43 | 1350 |
| 886189 | N/A | N/A | 11768 | 11783 | CCTAGATGTTAGACTG | 35 | 1351 |
| 886209 | N/A | N/A | 12203 | 12218 | GATCAGATTCTACCTC | 116 | 1352 |
| 886229 | N/A | N/A | 12849 | 12864 | TGGAACTGCATAGGGC | 26 | 1353 |
| 886249 | N/A | N/A | 13802 | 13817 | CCAATGAACGGCCTCT | 58 | 1354 |
| 886269 | N/A | N/A | 14226 | 14241 | CCTCCCCGAGATGTTC | 33 | 1355 |
| 886289 | N/A | N/A | 14772 | 14787 | CGCCATGGACCCTGCG | 93 | 1356 |
| 886308 | N/A | N/A | 15730 | 15745 | TTGAAGACAGCGATGA | 25 | 1357 |
| 886328 | N/A | N/A | 16372 | 16387 | GATGACTCCGGGTCCC | 110 | 1358 |
| 886348 | N/A | N/A | 17121 | 17136 | CATCATGTCCAGTCTG | 28 | 1359 |
| 886368 | N/A | N/A | 17776 | 17791 | GCCCAGCCGAGGTAAT | 66 | 1360 |
| 886388 | N/A | N/A | 18697 | 18712 | CAGGTCCTACCTCAAC | 34 | 1361 |
| 886408 | N/A | N/A | 19122 | 19137 | GAAGAGCTCACTTAAA | 74 | 1362 |
| 886427 | N/A | N/A | 19600 | 19615 | GTCAAGGTATTCCAGC | 17 | 1363 |
| 886447 | N/A | N/A | 19979 | 19994 | TCAGTATGAATGTCAT | 22 | 1364 |
| 886467 | N/A | N/A | 20528 | 20543 | TGACATGGGCCGTGGC | 37 | 1365 |
| 886487 | N/A | N/A | 21590 | 21605 | GCAAGCTATTATCTGC | 67 | 1366 |
| 886506 | N/A | N/A | 22526 | 22541 | GCCCACCTAACTTGCC | 86 | 1367 |
| 886526 | N/A | N/A | 23179 | 23194 | CAGGAACTACTGTTGC | 59 | 1368 |
| 886546 | N/A | N/A | 23989 | 24004 | ATACATAGTGTTGGCT | 47 | 1369 |
| 886566 | N/A | N/A | 25200 | 25215 | ACTGACTATAAGGGCA | 39 | 1370 |
| 886586 | N/A | N/A | 26277 | 26292 | AATTTTAGTCCCAACC | 93 | 1371 |
| 886606 | N/A | N/A | 26911 | 26926 | GAGGTGTTTTCATGAG | 51 | 1372 |
| 886626 | N/A | N/A | 27549 | 27564 | GATCATGGCCATTAGC | 63 | 1373 |
| 886646 | N/A | N/A | 28569 | 28584 | CCGCAGACTTGGATGC | 37 | 1374 |
| 886666 | N/A | N/A | 28980 | 28995 | CACTACCTATTGGTGG | 71 | 1375 |
| 886686 | N/A | N/A | 29492 | 29507 | ACCTAGACATACTCTG | 62 | 1376 |
| 886706 | N/A | N/A | 30059 | 30074 | ATCTTGAGGGCATATC | 44 | 1377 |
| 886726 | N/A | N/A | 30736 | 30751 | AGTTACATGAGTGACT | 67 | 1378 |
| 886746 | N/A | N/A | 31196 | 31211 | TCCTAACTCTTTCAGT | 115 | 1379 |
| 886766 | N/A | N/A | 31615 | 31630 | TGCCATCCATAAAGAT | 78 | 1380 |
| 886786 | N/A | N/A | 32461 | 32476 | CCAAAGTCCAGACGCA | 31 | 1381 |
| 886806 | N/A | N/A | 33360 | 33375 | CCAAATGACCATTGCT | 40 | 1382 |
| 886826 | N/A | N/A | 33860 | 33875 | CGTAATGCCTACGGAG | 96 | 1383 |
| 886846 | N/A | N/A | 34345 | 34360 | GCCTATTGCATGCGGG | 56 | 1384 |
| 886866 | N/A | N/A | 34875 | 34890 | TGCAACCCAAGACAGT | 83 | 1385 |
| 886886 | N/A | N/A | 35331 | 35346 | TAACAGAGTGCTAGCA | 101 | 1386 |
| 886906 | N/A | N/A | 35761 | 35776 | GGGAATACGCCACATG | 91 | 1387 |
| 886926 | N/A | N/A | 36364 | 36379 | AGCAATGCCTATGGGC | 146 | 1388 |
| 886946 | N/A | N/A | 36838 | 36853 | CCGGATGCTGACAATT | 78 | 1389 |

TABLE 28
Percent control of human PMP22 RNA with 3-10-3
cEt gapmers

| | SEQ | SEQ | SEQ | SEQ | | | |
|---|---|---|---|---|---|---|---|
| | ID | ID | ID | ID | | | |
| | NO: 1 | NO: 1 | NO: 2 | NO: 2 | | PMP22 | SEQ |
| Compound | Start | Stop | Start | Stop | Sequence | (% UTC) | ID |
| ID | Site | Site | Site | Site | (5′ to 3′) | RTS35670 | NO |
| 684394 | 1489 | 1504 | 37852 | 37867 | ATTATTCAGGTCTCCA | 16 | 31 |
| 684394 | 1489 | 1504 | 37852 | 37867 | ATTATTCAGGTCTCCA | 19 | 31 |
| 885440* | 226 | 241 | 7261 | 7276 | CATTCTGGCGGCAAGT | 38 | 1390 |
| 885460 | 307 | 322 | N/A | N/A | CCATTGGCTGACGATC | 104 | 1391 |
| 885480 | 380 | 395 | 8871 | 8886 | AGTGGTGGACATTTCC | 34 | 1392 |
| 885499 | 570 | 585 | 36933 | 36948 | ATGGCCGCAGCACTCA | 44 | 1393 |
| 885518 | 597 | 612 | 36960 | 36975 | TGCCACTCCGGGTGCC | 59 | 1394 |
| 885538 | 626 | 641 | 36989 | 37004 | CGAAACCGTAGGAGTA | 62 | 1395 |
| 885558 | 750 | 765 | 37113 | 37128 | TTCCCTATGTACGCTC | 36 | 1396 |
| 885578 | 960 | 975 | 37323 | 37338 | ACGAGGCTGATGGTCA | 16 | 1397 |
| 885598 | 1005 | 1020 | 37368 | 37383 | ACTGTTAGGATGTAAA | 30 | 1398 |
| 885618 | 1133 | 1148 | 37496 | 37511 | ATGAGGTGGACTGGGA | 59 | 1399 |
| 885638 | 1213 | 1228 | 37576 | 37591 | TTCTGTTGGATGCACT | 69 | 1400 |
| 885658 | 1288 | 1303 | 37651 | 37666 | TTTGCAAGGGCTCCAG | 24 | 1401 |
| 885678 | 1322 | 1337 | 37685 | 37700 | TAAGGGCAAGTATGCC | 55 | 1402 |
| 885698 | 1354 | 1369 | 37717 | 37732 | CATTTAGATGTGTGAC | 37 | 1403 |
| 885716 | 1482 | 1497 | 37845 | 37860 | AGGTCTCCATTCTATC | 30 | 1404 |
| 885735 | 1603 | 1618 | 37966 | 37981 | TCCGACCGTAAGAAAA | 74 | 1405 |
| 885755 | 1651 | 1666 | 38014 | 38029 | GCTCTAGGAACTCACG | 36 | 1406 |
| 885774 | 1741 | 1756 | 38104 | 38119 | AGGGCACCATATATAC | 172 | 1407 |
| 885793 | N/A | N/A | 5483 | 5498 | GCGCCGCCAAAGCTGC | 122 | 1408 |
| 885833 | N/A | N/A | 7176 | 7191 | CGGAGGCGCGCGCAGA | 151 | 1409 |
| 885853 | N/A | N/A | 7203 | 7218 | TGAGGCCGAACGCACT | 92 | 1410 |
| 885893 | N/A | N/A | 32733 | 32748 | CCGGTAACCACACATT | 91 | 1411 |
| 885913 | N/A | N/A | 32844 | 32859 | TCTATAGCTATATTGA | 85 | 1412 |
| 885933 | N/A | N/A | 3336 | 3351 | CACCATATACTGCCAG | 34 | 1413 |
| 885953 | N/A | N/A | 4368 | 4383 | GTGTACTGTGTCATAG | 13 | 1414 |
| 885973 | N/A | N/A | 4887 | 4902 | ACCTACGAAGCATGCC | 61 | 1415 |
| 885990 | N/A | N/A | 5721 | 5736 | CCCATTGGAGGGAAAC | 89 | 1416 |
| 886010 | N/A | N/A | 6267 | 6282 | CCGAGAATTTCAGCCG | 43 | 1417 |
| 886030 | N/A | N/A | 6721 | 6736 | GGAGACAGCGGCGAGG | 64 | 1418 |
| 886050 | N/A | N/A | 7570 | 7585 | AAATAGAGACCTGCGC | 80 | 1419 |
| 886070 | N/A | N/A | 8454 | 8469 | TCCTATCAGTCTGATA | 103 | 1420 |
| 886090 | N/A | N/A | 9071 | 9086 | CCCCAGCGAGATCACC | 32 | 1421 |
| 886110 | N/A | N/A | 9487 | 9502 | CTGGATTAAGGACCCC | 29 | 1422 |
| 886130 | N/A | N/A | 9995 | 10010 | GTCCAGCAAAGCAACT | 103 | 1423 |
| 886150 | N/A | N/A | 10567 | 10582 | GTCCAGGATTCTGTGC | 57 | 1424 |
| 886170 | N/A | N/A | 11034 | 11049 | GATTAAGCCTGAGTGG | 56 | 1425 |
| 886190 | N/A | N/A | 11773 | 11788 | CACAACCTAGATGTTA | 58 | 1426 |
| 886210 | N/A | N/A | 12233 | 12248 | ACTTAAATCCTGCCCA | 93 | 1427 |
| 886230 | N/A | N/A | 12856 | 12871 | GGACTTATGGAACTGC | 23 | 1428 |
| 886250 | N/A | N/A | 13807 | 13822 | TAAGACCAATGAACGG | 79 | 1429 |
| 886270 | N/A | N/A | 14227 | 14242 | ACCTCCCCGAGATGTT | 51 | 1430 |
| 886290 | N/A | N/A | 14787 | 14802 | CCTCATTCAAAGCGAC | 51 | 1431 |
| 886309 | N/A | N/A | 15748 | 15763 | AACAAGTCTGGGATCG | 53 | 1432 |
| 886329 | N/A | N/A | 16404 | 16419 | GGCTCGATGGGATAGG | 29 | 1433 |
| 886349 | N/A | N/A | 17261 | 17276 | CCCTAGCTAAGCCACC | 46 | 1434 |
| 886369 | N/A | N/A | 18079 | 18094 | GGGTTTAACAAGGTAA | 57 | 1435 |
| 886389 | N/A | N/A | 18698 | 18713 | GCAGGTCCTACCTCAA | 29 | 1436 |
| 886409 | N/A | N/A | 19164 | 19179 | CGGATTTATCAGGAGA | 15 | 1437 |
| 886428 | N/A | N/A | 19614 | 19629 | GAAGGAATCTTCATGT | 57 | 1438 |
| 886448 | N/A | N/A | 19980 | 19995 | CTCAGTATGAATGTCA | 35 | 1439 |
| 886468 | N/A | N/A | 20555 | 20570 | CCGGTATAAGAGCTGC | 101 | 1440 |
| 886488 | N/A | N/A | 21597 | 21612 | TCGACATGCAAGCTAT | 51 | 1441 |
| 886507 | N/A | N/A | 22576 | 22591 | GTTAGGACAGCCCAGG | 64 | 1442 |
| 886527 | N/A | N/A | 23195 | 23210 | TGTCAGTGGGTTCCCC | 49 | 1443 |
| 886547 | N/A | N/A | 24062 | 24077 | TGGAAGCATACATGTA | 30 | 1444 |
| 886567 | N/A | N/A | 25222 | 25237 | CACACATGGGACAGCT | 58 | 1445 |
| 886587 | N/A | N/A | 26403 | 26418 | ACTACGAGACCTCACA | 94 | 1446 |
| 886607 | N/A | N/A | 26915 | 26930 | TCCAGAGGTGTTTTCA | 38 | 1447 |
| 886627 | N/A | N/A | 27592 | 27607 | GGACAACCCGTATTTT | 47 | 1448 |
| 886647 | N/A | N/A | 28576 | 28591 | AATCATTCCGCAGACT | 83 | 1449 |
| 886667 | N/A | N/A | 29040 | 29055 | GCCCAGTAGAATCTAG | 106 | 1450 |
| 886687 | N/A | N/A | 29511 | 29526 | ATTGAGAACATCTCCC | 50 | 1451 |
| 886707 | N/A | N/A | 30064 | 30079 | ATATTATCTTGAGGGC | 33 | 1452 |
| 886727 | N/A | N/A | 30793 | 30808 | CGCAATACCTAGGAGA | 38 | 1453 |
| 886747 | N/A | N/A | 31209 | 31224 | CTCCAAATAGAGTTCC | 95 | 1454 |
| 886767 | N/A | N/A | 31625 | 31640 | AGCTGATGTGTGCCAT | 38 | 1455 |
| 886787 | N/A | N/A | 32491 | 32506 | TGGCTATAGGTTCTGA | 60 | 1456 |
| 886807 | N/A | N/A | 33366 | 33381 | CAGTATCCAAATGACC | 45 | 1457 |
| 886827 | N/A | N/A | 33889 | 33904 | GGGTTAGTGAGTCAAG | 75 | 1458 |
| 886847 | N/A | N/A | 34401 | 34416 | TCCCAGTACATCCTTA | 68 | 1459 |
| 886867 | N/A | N/A | 34934 | 34949 | GCAATAGATGTACCCT | 49 | 1460 |
| 886887 | N/A | N/A | 35421 | 35436 | ACTGAAGTTGTCTCTT | 65 | 1461 |
| 886907 | N/A | N/A | 35768 | 35783 | CAGAAGTGGGAATACG | 63 | 1462 |
| 886927 | N/A | N/A | 36384 | 36399 | GCCACATACCAGGTGA | 64 | 1463 |
| 886947 | N/A | N/A | 36845 | 36860 | CGCCACCCCGGATGCT | 87 | 1464 |

TABLE 29
Percent control of human PMP22 RNA with
3-10-3 cEt gapmers

| | SEQ | SEQ | SEQ | SEQ | | PMP22 | |
|---|---|---|---|---|---|---|---|
| | ID | ID | ID | ID | | (% | |
| Com- | NO: 1 | NO: 1 | NO: 2 | NO: 2 | | UTC) | SEQ |
| pound | Start | Stop | Start | Stop | Sequence | RTS | ID |
| ID | Site | Site | Site | Site | (5′ to 3′) | 35670 | NO |
| 684394 | 1489 | 1504 | 37852 | 37867 | ATTATTCAGGT | 14 | 31 |
| | | | | | CTCCA | | |
| 684394 | 1489 | 1504 | 37852 | 37867 | ATTATTCAGGT | 12 | 31 |
| | | | | | CTCCA | | |
| 823764 | 1488 | 1503 | 37851 | 37866 | TTATTCAGGTC | 17 | 1465 |
| | | | | | TCCAT | | |
| 885441 | 227 | 242 | 7262 | 7277 | GCATTCTGGCG | 18* | 1466 |
| | | | | | GCAAG | | |
| 885461 | 308 | 323 | N/A | N/A | TCCATTGGCTG | 105 | 1467 |
| | | | | | ACGAT | | |
| 885481 | 381 | 396 | 8872 | 8887 | CAGTGGTGGAC | 63 | 1468 |
| | | | | | ATTTC | | |
| 885500 | 571 | 586 | 36934 | 36949 | GATGGCCGCAG | 52 | 1469 |
| | | | | | CACTC | | |
| 885519 | 598 | 613 | 36961 | 36976 | ATGCCACTCCG | 52 | 1470 |
| | | | | | GGTGC | | |
| 885539 | 628 | 643 | 36991 | 37006 | GGCGAAACCGT | 48 | 1471 |
| | | | | | AGGAG | | |
| 885559 | 751 | 766 | 37114 | 37129 | CTTCCCTATGT | 35 | 1472 |
| | | | | | ACGCT | | |
| 885579 | 962 | 977 | 37325 | 37340 | ACACGAGGCTG | 50 | 1473 |
| | | | | | ATGGT | | |
| 885599 | 1006 | 1021 | 37369 | 37384 | TACTGTTAGGA | 62 | 1474 |
| | | | | | TGTAA | | |
| 885619 | 1135 | 1150 | 37498 | 37513 | AAATGAGGTGG | 46 | 1475 |
| | | | | | ACTGG | | |
| 885639 | 1221 | 1236 | 37584 | 37599 | GCGGCTGTTTC | 55 | 1476 |
| | | | | | TGTTG | | |
| 885659 | 1289 | 1304 | 37652 | 37667 | TTTTGCAAGGG | 42 | 1477 |
| | | | | | CTCCA | | |
| 885679 | 1324 | 1339 | 37687 | 37702 | TGTAAGGGCAA | 81 | 1478 |
| | | | | | GTATG | | |
| 885699 | 1355 | 1370 | 37718 | 37733 | TCATTTAGATG | 55 | 1479 |
| | | | | | TGTGA | | |
| 885736 | 1605 | 1620 | 37968 | 37983 | GCTCCGACCGT | 77 | 1480 |
| | | | | | AAGAA | | |
| 885756 | 1654 | 1669 | 38017 | 38032 | CAAGCTCTAGG | 39 | 1481 |
| | | | | | AACTC | | |
| 885775 | 1744 | 1759 | 38107 | 38122 | AGAAGGGCACC | 46 | 1482 |
| | | | | | ATATA | | |
| 885794 | N/A | N/A | 5496 | 5511 | GGCTCCGCTGC | 66 | 1483 |
| | | | | | TGGCG | | |
| 885834 | N/A | N/A | 7178 | 7193 | GACGGAGGCGC | 97 | 1484 |
| | | | | | GCGCA | | |
| 885854 | N/A | N/A | 7204 | 7219 | GTGAGGCCGAA | 76 | 1485 |
| | | | | | CGCAC | | |
| 885894 | N/A | N/A | 32734 | 32749 | CCCGGTAACCA | 74 | 1486 |
| | | | | | CACAT | | |
| 885914 | N/A | N/A | 32847 | 32862 | TGCTCTATAGC | 30 | 1487 |
| | | | | | TATAT | | |
| 885934 | N/A | N/A | 3341 | 3356 | AGCCACACCAT | 96 | 1488 |
| | | | | | ATACT | | |
| 885954 | N/A | N/A | 4373 | 4388 | CTCTAGTGTAC | 36 | 1489 |
| | | | | | TGTGT | | |
| 885974 | N/A | N/A | 4903 | 4918 | CGCTATTACTG | 54 | 1490 |
| | | | | | TCTGC | | |
| 885991 | N/A | N/A | 5755 | 5770 | CCATAAAGGCT | 72 | 1491 |
| | | | | | CTCCT | | |
| 886011 | N/A | N/A | 6280 | 6295 | TAAAAGGCTGA | 57 | 1492 |
| | | | | | GTCCG | | |
| 886031 | N/A | N/A | 6769 | 6784 | GCCCAGATTTC | 77 | 1493 |
| | | | | | CGTCT | | |
| 886051 | N/A | N/A | 7588 | 7603 | TCTGAAGTTAC | 27 | 1494 |
| | | | | | TTGGC | | |
| 886071 | N/A | N/A | 8463 | 8478 | GTTTATAGCTC | 54 | 1495 |
| | | | | | CTATC | | |
| 886091 | N/A | N/A | 9076 | 9091 | AGCTTCCCCAG | 85 | 1496 |
| | | | | | CGAGA | | |
| 886111 | N/A | N/A | 9497 | 9512 | ATACGATCTTC | 40 | 1497 |
| | | | | | TGGAT | | |
| 886131 | N/A | N/A | 10019 | 10034 | GGGTACTGAGC | 33 | 1498 |
| | | | | | TGTAA | | |
| 886151 | N/A | N/A | 10608 | 10623 | TTTAACACGCC | 48 | 1499 |
| | | | | | TGCCA | | |
| 886171 | N/A | N/A | 11077 | 11092 | GATAACCACTA | 50 | 1500 |
| | | | | | CTGGG | | |
| 886191 | N/A | N/A | 11781 | 11796 | TCAAACTACAC | 62 | 1501 |
| | | | | | AACCT | | |
| 886211 | N/A | N/A | 12281 | 12296 | CCTTACCTTAG | 56 | 1502 |
| | | | | | GTCAC | | |
| 886231 | N/A | N/A | 12863 | 12878 | ATAACTGGGAC | 65 | 1503 |
| | | | | | TTATG | | |
| 886251 | N/A | N/A | 13844 | 13859 | TTCCGATGGGC | 52 | 1504 |
| | | | | | CTTGT | | |
| 886271 | N/A | N/A | 14232 | 14247 | ATGGAACCTCC | 64 | 1505 |
| | | | | | CCGAG | | |
| 886291 | N/A | N/A | 14830 | 14845 | TTCCAGATTGT | 48 | 1506 |
| | | | | | ATGAG | | |
| 886310 | N/A | N/A | 15797 | 15812 | GGAAATTGTCT | 45 | 1507 |
| | | | | | GGTGT | | |
| 886330 | N/A | N/A | 16431 | 16446 | TGGTAGGCATA | 31 | 1508 |
| | | | | | TTGCA | | |
| 886350 | N/A | N/A | 17295 | 17310 | TGTCATGAGAC | 42 | 1509 |
| | | | | | CTGTT | | |
| 886370 | N/A | N/A | 18139 | 18154 | CAGCACATCAG | 60 | 1510 |
| | | | | | GCATG | | |
| 886390 | N/A | N/A | 18699 | 18714 | TGCAGGTCCTA | 68 | 1511 |
| | | | | | CCTCA | | |
| 886410 | N/A | N/A | 19206 | 19221 | GATCAAAGCCT | 71 | 1512 |
| | | | | | GCTTA | | |
| 886429 | N/A | N/A | 19637 | 19652 | GGGCACAAACT | 89 | 1513 |
| | | | | | GCTCA | | |
| 886449 | N/A | N/A | 19981 | 19996 | TCTCAGTATGA | 29 | 1514 |
| | | | | | ATGTC | | |
| 886469 | N/A | N/A | 20565 | 20580 | CTGAGAGTGTC | 33 | 1515 |
| | | | | | CGGTA | | |
| 886489 | N/A | N/A | 21602 | 21617 | TGGATTCGACA | 19 | 1516 |
| | | | | | TGCAA | | |
| 886508 | N/A | N/A | 22637 | 22652 | AGGTAAGGGTC | 38 | 1517 |
| | | | | | CCGTG | | |
| 886528 | N/A | N/A | 23200 | 23215 | ATTGATGTCAG | 24 | 1518 |
| | | | | | TGGGT | | |
| 886548 | N/A | N/A | 24067 | 24082 | GACTTTGGAAG | 38 | 1519 |
| | | | | | CATAC | | |
| 886568 | N/A | N/A | 25333 | 25348 | TGTCAGGTAGA | 60 | 1520 |
| | | | | | CCAAA | | |
| 886588 | N/A | N/A | 26412 | 26427 | GCAGAAACTAC | 32 | 1521 |
| | | | | | TACGA | | |
| 886608 | N/A | N/A | 26950 | 26965 | TCAACTAGTCC | 46 | 1522 |
| | | | | | AGCTC | | |
| 886628 | N/A | N/A | 27603 | 27618 | TCAATTTGCTT | 38 | 1523 |
| | | | | | GGACA | | |
| 886648 | N/A | N/A | 28581 | 28596 | AAACTAATCAT | 41 | 1524 |
| | | | | | TCCGC | | |
| 886668 | N/A | N/A | 29050 | 29065 | GTCAATCAAAG | 24 | 1525 |
| | | | | | CCCAG | | |
| 886688 | N/A | N/A | 29543 | 29558 | TGCTACATCCT | 127 | 1526 |
| | | | | | TTGCC | | |
| 886708 | N/A | N/A | 30132 | 30147 | ACCCAATCATC | 52 | 1527 |
| | | | | | GCTTA | | |
| 886728 | N/A | N/A | 30823 | 30838 | GCAAGAGTGGA | 40 | 1528 |
| | | | | | TTAGT | | |
| 886748 | N/A | N/A | 31229 | 31244 | CGATAAGGGAA | 43 | 1529 |
| | | | | | CCAGG | | |
| 886768 | N/A | N/A | 31664 | 31679 | CTCCAAGAGCC | 73 | 1530 |
| | | | | | CTAGC | | |
| 886788 | N/A | N/A | 32502 | 32517 | CAAGGAATAGA | 79 | 1531 |
| | | | | | TGGCT | | |
| 886808 | N/A | N/A | 33386 | 33401 | GCCCACTCCTT | 53 | 1532 |
| | | | | | TTACA | | |
| 886828 | N/A | N/A | 33930 | 33945 | AGCTGGAAGGT | 85 | 1533 |
| | | | | | GCATG | | |
| 886848 | N/A | N/A | 34408 | 34423 | AGGGAATTCCC | 129 | 1534 |
| | | | | | AGTAC | | |
| 886868 | N/A | N/A | 34954 | 34969 | CAAGATTGTCT | 60 | 1535 |
| | | | | | GCATG | | |
| 886888 | N/A | N/A | 35445 | 35460 | TGCTAACTCTT | 74 | 1536 |
| | | | | | GTCTT | | |
| 886908 | N/A | N/A | 35837 | 35852 | CTACATCTAAC | 102 | 1537 |
| | | | | | CTCAC | | |
| 886928 | N/A | N/A | 36397 | 36412 | CCCTAACAGAG | 54 | 1538 |
| | | | | | TTGCC | | |
| 886948 | N/A | N/A | 36865 | 36880 | TGGCAGAGCGG | 149 | 1539 |
| | | | | | CCCCC | | |

TABLE 30
Percent control of human PMP22 RNA with
3-10-3 cEt gapmers

| | SEQ | SEQ | SEQ | SEQ | | PMP22 | |
|---|---|---|---|---|---|---|---|
| | ID | ID | ID | ID | | (% | |
| Com- | NO: 1 | NO: 1 | NO: 2 | NO: 2 | | UTC) | SEQ |
| pound | Start | Stop | Start | Stop | Sequence | RTS | ID |
| ID | Site | Site | Site | Site | (5′ to 3′) | 35670 | NO |
| 684394 | 1489 | 1504 | 37852 | 37867 | ATTATTCAGGT | 30 | 31 |
| | | | | | CTCCA | | |
| 684394 | 1489 | 1504 | 37852 | 37867 | ATTATTCAGGT | 17 | 31 |
| | | | | | CTCCA | | |
| 885442 | 228 | 243 | 7263 | 7278 | AGCATTCTGGC | 29* | 1540 |
| | | | | | GGCAA | | |
| 885462 | 310 | 325 | N/A | N/A | GATCCATTGGC | 125 | 1541 |
| | | | | | TGACG | | |
| 885482 | 383 | 398 | 8874 | 8889 | AACAGTGGTGG | 64 | 1542 |
| | | | | | ACATT | | |
| 885501 | 572 | 587 | 36935 | 36950 | AGATGGCCGCA | 60 | 1543 |
| | | | | | GCACT | | |
| 885520 | 600 | 615 | 36963 | 36978 | AGATGCCACTC | 57 | 1544 |
| | | | | | CGGGT | | |
| 885540 | 630 | 645 | 36993 | 37008 | TAGGCGAAACC | 45 | 1545 |
| | | | | | GTAGG | | |
| 885560 | 752 | 767 | 37115 | 37130 | CCTTCCCTATG | 53 | 1546 |
| | | | | | TACGC | | |
| 885580 | 963 | 978 | 37326 | 37341 | AACACGAGGCT | 43 | 1547 |
| | | | | | GATGG | | |
| 885600 | 1008 | 1023 | 37371 | 37386 | TATACTGTTAG | 33 | 1548 |
| | | | | | GATGT | | |
| 885620 | 1136 | 1151 | 37499 | 37514 | TAAATGAGGTG | 57 | 1549 |
| | | | | | GACTG | | |
| 885640 | 1222 | 1237 | 37585 | 37600 | AGCGGCTGTTT | 43 | 1550 |
| | | | | | CTGTT | | |
| 885660 | 1290 | 1305 | 37653 | 37668 | TTTTTGCAAGG | 46 | 1551 |
| | | | | | GCTCC | | |
| 885680 | 1326 | 1341 | 37689 | 37704 | CCTGTAAGGGC | 48 | 1552 |
| | | | | | AAGTA | | |
| 885700 | 1374 | 1389 | 37737 | 37752 | ACTTGTTGTCA | 23 | 1553 |
| | | | | | CTGAT | | |
| 885717 | 1490 | 1505 | 37853 | 37868 | AATTATTCAGG | 18 | 1554 |
| | | | | | TCTCC | | |
| 885737 | 1606 | 1621 | 37969 | 37984 | TGCTCCGACCG | 80 | 1555 |
| | | | | | TAAGA | | |
| 885757 | 1655 | 1670 | 38018 | 38033 | CCAAGCTCTAG | 49 | 1556 |
| | | | | | GAACT | | |
| 885776 | 1745 | 1760 | 38108 | 38123 | CAGAAGGGCAC | 50 | 1557 |
| | | | | | CATAT | | |
| 885795 | N/A | N/A | 5497 | 5512 | TGGCTCCGCTG | 54 | 1558 |
| | | | | | CTGGC | | |
| 885835 | N/A | N/A | 7179 | 7194 | CGACGGAGGCG | 110 | 1559 |
| | | | | | CGCGC | | |
| 885855 | N/A | N/A | 7205 | 7220 | CGTGAGGCCGA | 99 | 1560 |
| | | | | | ACGCA | | |
| 885895 | N/A | N/A | 32735 | 32750 | TCCCGGTAACC | 56 | 1561 |
| | | | | | ACACA | | |
| 885915 | N/A | N/A | 32848 | 32863 | ATGCTCTATAG | 51 | 1562 |
| | | | | | CTATA | | |
| 885935 | N/A | N/A | 3361 | 3376 | TCAATAACCAC | 39 | 1563 |
| | | | | | CCAGG | | |
| 885955 | N/A | N/A | 4419 | 4434 | GTTCACGCACG | 75 | 1564 |
| | | | | | CGCGC | | |
| 885975 | N/A | N/A | 4938 | 4953 | GTCTTAGCCGG | 81 | 1565 |
| | | | | | ACACA | | |
| 885992 | N/A | N/A | 5766 | 5781 | GGTCTTATAGA | 108 | 1566 |
| | | | | | CCATA | | |
| 886012 | N/A | N/A | 6305 | 6320 | GCGGACGGGAG | 77 | 1567 |
| | | | | | AGAGA | | |
| 886032 | N/A | N/A | 6814 | 6829 | GGTGAATTCCC | 77 | 1568 |
| | | | | | CTATG | | |
| 886052 | N/A | N/A | 7600 | 7615 | CCCTAGATCGG | 57 | 1569 |
| | | | | | CTCTG | | |
| 886072 | N/A | N/A | 8513 | 8528 | CAGCATCTCGG | 96 | 1570 |
| | | | | | GATCA | | |
| 886092 | N/A | N/A | 9109 | 9124 | GGTAGAGTGAA | 25 | 1571 |
| | | | | | TCACA | | |
| 886112 | N/A | N/A | 9538 | 9553 | TTCCATATCTC | 74 | 1572 |
| | | | | | ACAAG | | |
| 886132 | N/A | N/A | 10028 | 10043 | GGTATTACTGG | 41 | 1573 |
| | | | | | GTACT | | |
| 886152 | N/A | N/A | 10616 | 10631 | CGCCGGGTTTT | 72 | 1574 |
| | | | | | AACAC | | |
| 886172 | N/A | N/A | 11086 | 11101 | AGCGGCAGAGA | 47 | 1575 |
| | | | | | TAACC | | |
| 886192 | N/A | N/A | 11804 | 11819 | GGGCAAGATCT | 71 | 1576 |
| | | | | | GGTGT | | |
| 886212 | N/A | N/A | 12318 | 12333 | AGCCAACCAGT | 69 | 1577 |
| | | | | | CTACC | | |
| 886232 | N/A | N/A | 12942 | 12957 | GAAGAGCCCAT | 60 | 1578 |
| | | | | | GTGAG | | |
| 886252 | N/A | N/A | 13849 | 13864 | GTAGATTCCGA | 29 | 1579 |
| | | | | | TGGGC | | |
| 886272 | N/A | N/A | 14252 | 14267 | GCACTTGACGG | 20 | 1580 |
| | | | | | TCCTT | | |
| 886292 | N/A | N/A | 14888 | 14903 | ACTCACCCATA | 62 | 1581 |
| | | | | | GGGTC | | |
| 886311 | N/A | N/A | 15851 | 15866 | GCAGAAGGTCT | 58 | 1582 |
| | | | | | CCCGT | | |
| 886331 | N/A | N/A | 16439 | 16454 | TGAACATGTGG | 15 | 1583 |
| | | | | | TAGGC | | |
| 886351 | N/A | N/A | 17303 | 17318 | GCAAACCCTGT | 65 | 1584 |
| | | | | | CATGA | | |
| 886371 | N/A | N/A | 18218 | 18233 | CTGCAGTCATT | 67 | 1585 |
| | | | | | GTCCA | | |
| 886391 | N/A | N/A | 18706 | 18721 | TGCAATGTGCA | 55 | 1586 |
| | | | | | GGTCC | | |
| 886411 | N/A | N/A | 19247 | 19262 | TATCAATCTCC | 134 | 1587 |
| | | | | | CTCCT | | |
| 886430 | N/A | N/A | 19647 | 19662 | GGCCACTAGTG | 85 | 1588 |
| | | | | | GGCAC | | |
| 886450 | N/A | N/A | 19982 | 19997 | TTCTCAGTATG | 57 | 1589 |
| | | | | | AATGT | | |
| 886470 | N/A | N/A | 21207 | 21222 | ACTAAAGCTCT | 163 | 1590 |
| | | | | | GGCCG | | |
| 886490 | N/A | N/A | 21607 | 21622 | CAGGTTGGATT | 44 | 1591 |
| | | | | | CGACA | | |
| 886509 | N/A | N/A | 22660 | 22675 | TGACAGGGCTT | 87 | 1592 |
| | | | | | TGATC | | |
| 886529 | N/A | N/A | 23217 | 23232 | AGCCAAAGTTG | 37 | 1593 |
| | | | | | TGTCA | | |
| 886549 | N/A | N/A | 24227 | 24242 | GTTCAAGTGCT | 34 | 1594 |
| | | | | | TATAT | | |
| 886569 | N/A | N/A | 25338 | 25353 | ATAGATGTCAG | 54 | 1595 |
| | | | | | GTAGA | | |
| 886589 | N/A | N/A | 26441 | 26456 | CCCTTAACCCC | 75 | 1596 |
| | | | | | GCGCC | | |
| 886609 | N/A | N/A | 26959 | 26974 | CCTGAGAGATC | 70 | 1597 |
| | | | | | AACTA | | |
| 886629 | N/A | N/A | 27622 | 27637 | CTCTCTATAGG | 34 | 1598 |
| | | | | | TATGG | | |
| 886649 | N/A | N/A | 28596 | 28611 | CCACATCCTTC | 74 | 1599 |
| | | | | | TACTA | | |
| 886669 | N/A | N/A | 29093 | 29108 | TGACACAAGAG | 100 | 1600 |
| | | | | | TGTCA | | |
| 886689 | N/A | N/A | 29548 | 29563 | AGAGATGCTAC | 63 | 1601 |
| | | | | | ATCCT | | |
| 886709 | N/A | N/A | 30164 | 30179 | GAGCGAGGCAC | 70 | 1602 |
| | | | | | ATCTC | | |
| 886729 | N/A | N/A | 30893 | 30908 | CGGAATTCTGC | 67 | 1603 |
| | | | | | ACTTC | | |
| 886749 | N/A | N/A | 31236 | 31251 | TGTCACACGAT | 62 | 1604 |
| | | | | | AAGGG | | |
| 886769 | N/A | N/A | 31676 | 31691 | ACCTACAGTCA | 82 | 1605 |
| | | | | | GCTCC | | |
| 886789 | N/A | N/A | 32517 | 32532 | CCCAACAGATC | 53 | 1606 |
| | | | | | TTGTC | | |
| 886809 | N/A | N/A | 33396 | 33411 | TGTGATTGAAG | 46 | 1607 |
| | | | | | CCCAC | | |
| 886829 | N/A | N/A | 34010 | 34025 | ACATGATCAGA | 67 | 1608 |
| | | | | | CGCAC | | |
| 886849 | N/A | N/A | 34426 | 34441 | GGTCAAAGGAA | 76 | 1609 |
| | | | | | GTAGC | | |
| 886869 | N/A | N/A | 34987 | 35002 | CATGAGACTGA | 83 | 1610 |
| | | | | | TGTTT | | |
| 886889 | N/A | N/A | 35451 | 35466 | CCAAAGTGCTA | 47 | 1611 |
| | | | | | ACTCT | | |
| 886909 | N/A | N/A | 35843 | 35858 | GGCCACCTACA | 103 | 1612 |
| | | | | | TCTAA | | |
| 886929 | N/A | N/A | 36409 | 36424 | GGCCTATGGTC | 92 | 1613 |
| | | | | | CCCCT | | |
| 886949 | N/A | N/A | 36882 | 36897 | GGGTGACGGAG | 97 | 1614 |
| | | | | | AGTCC | | |

TABLE 31
Percent control of human PMP22 RNA with
3-10-3 cEt gapmers

| | SEQ | SEQ | SEQ | SEQ | | PMP22 | |
|---|---|---|---|---|---|---|---|
| | ID | ID | ID | ID | | (% | |
| Com- | NO: 1 | NO: 1 | NO: 2 | NO: 2 | | UTC) | SEQ |
| pound | Start | Stop | Start | Stop | Sequence | RTS | ID |
| ID | Site | Site | Site | Site | (5′ to 3′) | 35670 | NO |
| 684394 | 1489 | 1504 | 37852 | 37867 | ATTATTCAGGT | 8 | 31 |
| | | | | | CTCCA | | |
| 684394 | 1489 | 1504 | 37852 | 37867 | ATTATTCAGGT | 6 | 31 |
| | | | | | CTCCA | | |
| 885443 | 230 | 245 | 7265 | 7280 | GGAGCATTCTG | 2* | 1615 |
| | | | | | GCGGC | | |
| 885463 | 312 | 327 | N/A | N/A | ACGATCCATTG | 60 | 1616 |
| | | | | | GCTGA | | |
| 885483 | 446 | 461 | 28419 | 28434 | AGATGATCGAC | 78 | 1617 |
| | | | | | AGGAT | | |
| 885502 | 573 | 588 | 36936 | 36951 | TAGATGGCCGC | 60 | 1618 |
| | | | | | AGCAC | | |
| 885521 | 601 | 616 | 36964 | 36979 | GAGATGCCACT | 62 | 1619 |
| | | | | | CCGGG | | |
| 885541 | 674 | 689 | 37037 | 37052 | CACCGCTGAGA | 60 | 1620 |
| | | | | | AGGGC | | |
| 885561 | 753 | 768 | 37116 | 37131 | CCCTTCCCTAT | 65 | 1621 |
| | | | | | GTACG | | |
| 885581 | 965 | 980 | 37328 | 37343 | TCAACACGAGG | 46 | 1622 |
| | | | | | CTGAT | | |
| 885601 | 1012 | 1027 | 37375 | 37390 | GGATTATACTG | 7 | 1623 |
| | | | | | TTAGG | | |
| 885621 | 1138 | 1153 | 37501 | 37516 | TCTAAATGAGG | 50 | 1624 |
| | | | | | TGGAC | | |
| 885641 | 1223 | 1238 | 37586 | 37601 | CAGCGGCTGTT | 39 | 1625 |
| | | | | | TCTGT | | |
| 885661 | 1291 | 1306 | 37654 | 37669 | GTTTTTGCAAG | 28 | 1626 |
| | | | | | GGCTC | | |
| 885681 | 1327 | 1342 | 37690 | 37705 | ACCTGTAAGGG | 30 | 1627 |
| | | | | | CAAGT | | |
| 885701 | 1375 | 1390 | 37738 | 37753 | GACTTGTTGTC | 16 | 1628 |
| | | | | | ACTGA | | |
| 885718 | 1519 | 1534 | 37882 | 37897 | AGCAGTTATAA | 28 | 1629 |
| | | | | | ACCAT | | |
| 885738 | 1608 | 1623 | 37971 | 37986 | GATGCTCCGAC | 65 | 1630 |
| | | | | | CGTAA | | |
| 885758 | 1667 | 1682 | 38030 | 38045 | GCCTAGACCCA | 61 | 1631 |
| | | | | | GCCAA | | |
| 885777 | 1747 | 1762 | 38110 | 38125 | ATCAGAAGGGC | 32 | 1632 |
| | | | | | ACCAT | | |
| 885796 | N/A | N/A | 5498 | 5513 | TTGGCTCCGCT | 56 | 1633 |
| | | | | | GCTGG | | |
| 885836 | N/A | N/A | 7180 | 7195 | GCGACGGAGGC | 99 | 1634 |
| | | | | | GCGCG | | |
| 885856 | N/A | N/A | 7226 | 7241 | GCCTGCGAGGA | 109* | 1635 |
| | | | | | GAGCG | | |
| 885896 | N/A | N/A | 32736 | 32751 | ATCCCGGTAAC | 41 | 1636 |
| | | | | | CACAC | | |
| 885916 | N/A | N/A | 32849 | 32864 | AATGCTCTATA | 41 | 1637 |
| | | | | | GCTAT | | |
| 885936 | N/A | N/A | 3404 | 3419 | GCTACAGCTCG | 33 | 1638 |
| | | | | | CTTCT | | |
| 885956 | N/A | N/A | 4484 | 4499 | GCCTTGAGGCA | 56 | 1639 |
| | | | | | CGGGA | | |
| 885976 | N/A | N/A | 5017 | 5032 | TAATAGAGGGC | 41 | 1640 |
| | | | | | AGCGG | | |
| 885993 | N/A | N/A | 5772 | 5787 | CTGTAAGGTCT | 59 | 1641 |
| | | | | | TATAG | | |
| 886013 | N/A | N/A | 6310 | 6325 | GTCCAGCGGAC | 84 | 1642 |
| | | | | | GGGAG | | |
| 886033 | N/A | N/A | 6820 | 6835 | TCAGATGGTGA | 34 | 1643 |
| | | | | | ATTCC | | |
| 886053 | N/A | N/A | 7618 | 7633 | TCAAATGAAGG | 20 | 1644 |
| | | | | | TCGGG | | |
| 886073 | N/A | N/A | 8548 | 8563 | ACCTTAGACAC | 39 | 1645 |
| | | | | | CTGCA | | |
| 886093 | N/A | N/A | 9114 | 9129 | CTCTAGGTAGA | 48 | 1646 |
| | | | | | GTGAA | | |
| 886113 | N/A | N/A | 9567 | 9582 | CCCTTAATTTG | 33 | 1647 |
| | | | | | ACCCT | | |
| 886133 | N/A | N/A | 10034 | 10049 | TGCTTGGGTAT | 22 | 1648 |
| | | | | | TACTG | | |
| 886153 | N/A | N/A | 10626 | 10641 | GCTGAAACTTC | 50 | 1649 |
| | | | | | GCCGG | | |
| 886173 | N/A | N/A | 11094 | 11109 | GGGAAGATAGC | 65 | 1650 |
| | | | | | GGCAG | | |
| 886193 | N/A | N/A | 11822 | 11837 | TATTAAGATGT | 67 | 1651 |
| | | | | | AGCCT | | |
| 886213 | N/A | N/A | 12325 | 12340 | GAACACTAGCC | 34 | 1652 |
| | | | | | AACCA | | |
| 886233 | N/A | N/A | 12964 | 12979 | CAACAGGTCCT | 102 | 1653 |
| | | | | | AAAGT | | |
| 886253 | N/A | N/A | 13859 | 13874 | GATCATTCAGG | 78 | 1654 |
| | | | | | TAGAT | | |
| 886273 | N/A | N/A | 14265 | 14280 | CCCCAGCGATC | 61 | 1655 |
| | | | | | TTGCA | | |
| 886293 | N/A | N/A | 14917 | 14932 | CCTGAATCCTT | 90 | 1656 |
| | | | | | TGGGT | | |
| 886312 | N/A | N/A | 15895 | 15910 | GGGAGCCACGA | 92 | 1657 |
| | | | | | AGATT | | |
| 886332 | N/A | N/A | 16467 | 16482 | GGTAATAAGTT | 40 | 1658 |
| | | | | | CCCCA | | |
| 886352 | N/A | N/A | 17322 | 17337 | CCCTACATCTA | 68 | 1659 |
| | | | | | ACCCA | | |
| 886372 | N/A | N/A | 18225 | 18240 | GGTCACCCTGC | 46 | 1660 |
| | | | | | AGTCA | | |
| 886392 | N/A | N/A | 18750 | 18765 | TGCCACAATTA | 32 | 1661 |
| | | | | | CATCC | | |
| 886412 | N/A | N/A | 19258 | 19273 | ACGATGAAGGA | 34 | 1662 |
| | | | | | TATCA | | |
| 886431 | N/A | N/A | 19669 | 19684 | AGCTAGAGCAA | 45 | 1663 |
| | | | | | AGCCT | | |
| 886451 | N/A | N/A | 20007 | 20022 | TCACACAGATC | 60 | 1664 |
| | | | | | GCCAT | | |
| 886471 | N/A | N/A | 21240 | 21255 | ATCCAACCTTG | 43 | 1665 |
| | | | | | GTGCT | | |
| 886491 | N/A | N/A | 21692 | 21707 | CCATAGCCATG | 54 | 1666 |
| | | | | | GACAA | | |
| 886510 | N/A | N/A | 22697 | 22712 | CGCAGTAAGAG | 39 | 1667 |
| | | | | | ACAGC | | |
| 886530 | N/A | N/A | 23258 | 23273 | CGTATAGACAT | 27 | 1668 |
| | | | | | CCACA | | |
| 886550 | N/A | N/A | 24228 | 24243 | TGTTCAAGTGC | 13 | 1669 |
| | | | | | TTATA | | |
| 886570 | N/A | N/A | 25363 | 25378 | GAAGACTTTAG | 85 | 1670 |
| | | | | | CTTCC | | |
| 886590 | N/A | N/A | 26509 | 26524 | CATGAGGAGTA | 63 | 1671 |
| | | | | | TGGCT | | |
| 886610 | N/A | N/A | 27010 | 27025 | CCTAAGATGTT | 53 | 1672 |
| | | | | | TCCAA | | |
| 886630 | N/A | N/A | 27632 | 27647 | GAAAGGTATGC | 26 | 1673 |
| | | | | | TCTCT | | |
| 886650 | N/A | N/A | 28705 | 28720 | TCCCAAGTTCT | 31 | 1674 |
| | | | | | AAGAC | | |
| 886670 | N/A | N/A | 29126 | 29141 | TGTCATAGCCC | 62 | 1675 |
| | | | | | CATGT | | |
| 886690 | N/A | N/A | 29566 | 29581 | TGACAACCAAC | 55 | 1676 |
| | | | | | TCAGA | | |
| 886710 | N/A | N/A | 30169 | 30184 | GGTTTGAGCGA | 17 | 1677 |
| | | | | | GGCAC | | |
| 886730 | N/A | N/A | 30905 | 30920 | CGCTTTTACAT | 18 | 1678 |
| | | | | | TCGGA | | |
| 886750 | N/A | N/A | 31242 | 31257 | TAGAACTGTCA | 34 | 1679 |
| | | | | | CACGA | | |
| 886770 | N/A | N/A | 31745 | 31760 | GGCAAACCATG | 53 | 1680 |
| | | | | | GAGAC | | |
| 886790 | N/A | N/A | 32533 | 32548 | GTCTAGTGCAA | 57 | 1681 |
| | | | | | CCCAA | | |
| 886810 | N/A | N/A | 33472 | 33487 | CCTCAGGGCAA | 84 | 1682 |
| | | | | | CAAGG | | |
| 886830 | N/A | N/A | 34076 | 34091 | GGCCTTACATG | 140 | 1683 |
| | | | | | ACATG | | |
| 886850 | N/A | N/A | 34472 | 34487 | GTGATTAGAGC | 43 | 1684 |
| | | | | | CCAGA | | |
| 886870 | N/A | N/A | 35056 | 35071 | CCGTGATAAGC | 25 | 1685 |
| | | | | | AGTAA | | |
| 886890 | N/A | N/A | 35471 | 35486 | CTCTTCCACGG | 33 | 1686 |
| | | | | | CTTGC | | |
| 886910 | N/A | N/A | 35872 | 35887 | CCCAATGCACC | 79 | 1687 |
| | | | | | CGCGC | | |
| 886930 | N/A | N/A | 36435 | 36450 | GGATTAAGCTC | 42 | 1688 |
| | | | | | CATGC | | |
| 886950 | N/A | N/A | 36897 | 36912 | GGAGAGGGACA | 192 | 1689 |
| | | | | | AGCTG | | |

TABLE 32
Percent control of human PMP22 RNA with
3-10-3 cEt gapmers

| | SEQ | SEQ | SEQ | SEQ | | PMP22 | |
|---|---|---|---|---|---|---|---|
| | ID | ID | ID | ID | | (% | |
| Com- | NO: 1 | NO: 1 | NO: 2 | NO: 2 | | UTC) | SEQ |
| pound | Start | Stop | Start | Stop | Sequence | RTS | ID |
| ID | Site | Site | Site | Site | (5′ to 3′) | 35670 | NO |
| 684394 | 1489 | 1504 | 37852 | 37867 | ATTATTCAGGT | 23 | 31 |
| | | | | | CTCCA | | |
| 684394 | 1489 | 1504 | 37852 | 37867 | ATTATTCAGGT | 17 | 31 |
| | | | | | CTCCA | | |
| 885434 | 218 | 233 | 7253 | 7268 | CGGCAAGTTCT | 55* | 1690 |
| | | | | | GCTCA | | |
| 885454 | 256 | 271 | 7291 | 7306 | GAGGACGATGA | 62* | 1691 |
| | | | | | TACTC | | |
| 885474 | 353 | 368 | 8844 | 8859 | TGCTACAGTTC | 61 | 1692 |
| | | | | | TGCCA | | |
| 885494 | 521 | 536 | 28494 | 28509 | CAGTGATGTAA | 82 | 1693 |
| | | | | | AACCT | | |
| 885512 | 590 | 605 | 36953 | 36968 | CCGGGTGCCTC | 83 | 1694 |
| | | | | | ACCGT | | |
| 885532 | 618 | 633 | 36981 | 36996 | TAGGAGTAATC | 87 | 1695 |
| | | | | | CGAGT | | |
| 885552 | 727 | 742 | 37090 | 37105 | CAGACAGACCG | 105 | 1696 |
| | | | | | TCTGG | | |
| 885572 | 890 | 905 | 37253 | 37268 | TTTTATAAACC | 40 | 1697 |
| | | | | | GGAGA | | |
| 885592 | 991 | 1006 | 37354 | 37369 | AAGTTCCTTAG | 60 | 1698 |
| | | | | | CTACT | | |
| 885612 | 1085 | 1100 | 37448 | 37463 | GGCGAGATGGA | 54 | 1699 |
| | | | | | GTTAT | | |
| 885632 | 1199 | 1214 | 37562 | 37577 | CTGGGTCACCC | 78 | 1700 |
| | | | | | ACCAG | | |
| 885652 | 1238 | 1253 | 37601 | 37616 | ACACAGAGGTT | 49 | 1701 |
| | | | | | CGGGC | | |
| 885672 | 1309 | 1324 | 37672 | 37687 | GCCAATGCCAC | 50 | 1702 |
| | | | | | AAGCC | | |
| 885692 | 1346 | 1361 | 37709 | 37724 | TGTGTGACGAA | 53 | 1703 |
| | | | | | GATAC | | |
| 885711 | 1435 | 1450 | 37798 | 37813 | GTGAGTTGTTT | 29 | 1704 |
| | | | | | AGATG | | |
| 885729 | 1581 | 1596 | 37944 | 37959 | GAGTGATGAAG | 41 | 1705 |
| | | | | | GCTTT | | |
| 885749 | 1639 | 1654 | 38002 | 38017 | CACGGTCCCAA | 84 | 1706 |
| | | | | | GGAGT | | |
| 885768 | 1704 | 1719 | 38067 | 38082 | CAAGTCATTGC | 50 | 1707 |
| | | | | | CAGAC | | |
| 885787 | N/A | N/A | 5459 | 5474 | GCTGCGCGCGC | 88 | 1708 |
| | | | | | GCGAA | | |
| 885807 | N/A | N/A | 5543 | 5558 | GCTGTCCCGAT | 44 | 1709 |
| | | | | | CCTCA | | |
| 885827 | N/A | N/A | 7158 | 7173 | GAGGGTCCCGC | 142 | 1710 |
| | | | | | GCACT | | |
| 885847 | N/A | N/A | 7196 | 7211 | GAACGCACTGG | 79 | 1711 |
| | | | | | GCCGA | | |
| 885907 | N/A | N/A | 32763 | 32778 | GAGTCCCCTCT | 96 | 1712 |
| | | | | | ATTCT | | |
| 885927 | N/A | N/A | 3024 | 3039 | AGCCAGAGTAT | 43 | 1713 |
| | | | | | ATATC | | |
| 885947 | N/A | N/A | 3943 | 3958 | GGTGATTGAAG | 13 | 1714 |
| | | | | | GAGAC | | |
| 885967 | N/A | N/A | 4740 | 4755 | TACCACCGAAT | 47 | 1715 |
| | | | | | AAGCT | | |
| 885984 | N/A | N/A | 5283 | 5298 | GGCCTTAAATG | 89 | 1716 |
| | | | | | CGCCT | | |
| 886004 | N/A | N/A | 6118 | 6133 | GACCATTTTAG | 84 | 1717 |
| | | | | | GCAGA | | |
| 886024 | N/A | N/A | 6590 | 6605 | GGCGGCTCCGG | 70 | 1718 |
| | | | | | AGAGG | | |
| 886044 | N/A | N/A | 7151 | 7166 | CCGCGCACTAG | 110 | 1719 |
| | | | | | CGGAA | | |
| 886064 | N/A | N/A | 7899 | 7914 | TCTAATGGGCT | 55 | 1720 |
| | | | | | GGACA | | |
| 886084 | N/A | N/A | 8805 | 8820 | CCACGATCCAT | 71 | 1721 |
| | | | | | TGCTA | | |
| 886104 | N/A | N/A | 9347 | 9362 | GTCCATGTAAC | 69 | 1722 |
| | | | | | TGACG | | |
| 886124 | N/A | N/A | 9830 | 9845 | GCCTTTTAAAC | 42 | 1723 |
| | | | | | CCAGG | | |
| 886144 | N/A | N/A | 10431 | 10446 | CCGGAGTGCTC | 115 | 1724 |
| | | | | | CGGGA | | |
| 886164 | N/A | N/A | 10888 | 10903 | TTGAAACCCAC | 108 | 1725 |
| | | | | | ACTAA | | |
| 886184 | N/A | N/A | 11708 | 11723 | CATGAGTGGCA | 65 | 1726 |
| | | | | | ACCCC | | |
| 886204 | N/A | N/A | 12037 | 12052 | GGCAAGGCCCA | 101 | 1727 |
| | | | | | TGCAT | | |
| 886224 | N/A | N/A | 12755 | 12770 | GGCTTACAGAG | 56 | 1728 |
| | | | | | AGGTA | | |
| 886244 | N/A | N/A | 13616 | 13631 | GGCAACAGGCA | 57 | 1729 |
| | | | | | TTGGA | | |
| 886264 | N/A | N/A | 14148 | 14163 | TCCCATTACCC | 69 | 1730 |
| | | | | | TGTCT | | |
| 886284 | N/A | N/A | 14549 | 14564 | ACCGATGCATT | 56 | 1731 |
| | | | | | TCTAC | | |
| 886304 | N/A | N/A | 15440 | 15455 | CTGCAGGTACT | 72 | 1732 |
| | | | | | GCCCT | | |
| 886323 | N/A | N/A | 16147 | 16162 | GGGATACAATT | 71 | 1733 |
| | | | | | GAAGT | | |
| 886343 | N/A | N/A | 16816 | 16831 | CCTATAACTGG | 47 | 1734 |
| | | | | | TCCTT | | |
| 886363 | N/A | N/A | 17597 | 17612 | CTGTATTCAGC | 30 | 1735 |
| | | | | | ACCAC | | |
| 886383 | N/A | N/A | 18644 | 18659 | AACCAGGGTAC | 76 | 1736 |
| | | | | | CTGCC | | |
| 886403 | N/A | N/A | 19027 | 19042 | AGGGAATAATT | 64 | 1737 |
| | | | | | CGCTT | | |
| 886423 | N/A | N/A | 19513 | 19528 | TGTCAGGGTCT | 51 | 1738 |
| | | | | | AGTTC | | |
| 886442 | N/A | N/A | 19929 | 19944 | CCTAAACAATG | 99 | 1739 |
| | | | | | TGGCC | | |
| 886462 | N/A | N/A | 20475 | 20490 | GCTCGAGTTGC | 57 | 1740 |
| | | | | | ACAAA | | |
| 886482 | N/A | N/A | 21454 | 21469 | TGTGACACCAA | 31 | 1741 |
| | | | | | CATCC | | |
| 886501 | N/A | N/A | 22340 | 22355 | TTACAGGCTGT | 86 | 1742 |
| | | | | | TATTG | | |
| 886521 | N/A | N/A | 23006 | 23021 | CTCAAAGGGCT | 65 | 1743 |
| | | | | | AGTGG | | |
| 886541 | N/A | N/A | 23768 | 23783 | GGTGACACCAA | 69 | 1744 |
| | | | | | TTTTC | | |
| 886561 | N/A | N/A | 24994 | 25009 | ATATAGAGAGC | 88 | 1745 |
| | | | | | CACAT | | |
| 886581 | N/A | N/A | 26134 | 26149 | CTCTGATGATC | 107 | 1746 |
| | | | | | CAGAG | | |
| 886601 | N/A | N/A | 26906 | 26921 | GTTTTCATGAG | 26 | 1747 |
| | | | | | CCCAA | | |
| 886621 | N/A | N/A | 27496 | 27511 | CGGGATGAAGG | 67 | 1748 |
| | | | | | CTTAC | | |
| 886641 | N/A | N/A | 28363 | 28378 | AGACACTTGGT | 95 | 1749 |
| | | | | | TAGGA | | |
| 886661 | N/A | N/A | 28940 | 28955 | TGCTAGTTCTT | 79 | 1750 |
| | | | | | AGCAC | | |
| 886681 | N/A | N/A | 29354 | 29369 | AGCTAATGTAA | 89 | 1751 |
| | | | | | GATGC | | |
| 886701 | N/A | N/A | 29923 | 29938 | GGGTAACTCTT | 59 | 1752 |
| | | | | | CACTT | | |
| 886721 | N/A | N/A | 30636 | 30651 | GCCGAAACAGC | 33 | 1753 |
| | | | | | TCAGC | | |
| 886741 | N/A | N/A | 31143 | 31158 | GTGCAACATCC | 63 | 1754 |
| | | | | | TAGAG | | |
| 886761 | N/A | N/A | 31529 | 31544 | ACAGAGATTCT | 44 | 1755 |
| | | | | | AGTGG | | |
| 886781 | N/A | N/A | 32338 | 32353 | TCCCAACCCTA | 104 | 1756 |
| | | | | | AATGC | | |
| 886801 | N/A | N/A | 33303 | 33318 | GGCCAGTGAGA | 69 | 1757 |
| | | | | | CATCC | | |
| 886821 | N/A | N/A | 33738 | 33753 | AGCGATGTCTC | 79 | 1758 |
| | | | | | AGAAG | | |
| 886841 | N/A | N/A | 34280 | 34295 | TCCTACCTTAA | 94 | 1759 |
| | | | | | GGACT | | |
| 886861 | N/A | N/A | 34779 | 34794 | GTGGAGATGTA | 92 | 1760 |
| | | | | | TCACC | | |
| 886881 | N/A | N/A | 35261 | 35276 | CCAGATCTGGC | 84 | 1761 |
| | | | | | ATGAG | | |
| 886901 | N/A | N/A | 35673 | 35688 | AGCCACACAAT | 76 | 1762 |
| | | | | | AGTCT | | |
| 886921 | N/A | N/A | 36243 | 36258 | ATCAAAGGCAA | 53 | 1763 |
| | | | | | GCTCC | | |
| 886941 | N/A | N/A | 36636 | 36651 | TGTCACCAATT | 53 | 1764 |
| | | | | | CCCAG | | |

TABLE 33
Percent control of human PMP22 RNA with
3-10-3 cEt gapmers

| | SEQ | SEQ | SEQ | SEQ | | PMP22 | |
|---|---|---|---|---|---|---|---|
| | ID | ID | ID | ID | | (% | |
| Com- | NO: 1 | NO: 1 | NO: 2 | NO: 2 | | UTC) | SEQ |
| pound | Start | Stop | Start | Stop | Sequence | RTS | ID |
| ID | Site | Site | Site | Site | (5′ to 3′) | 35670 | NO |
| 684394 | 1489 | 1504 | 37852 | 37867 | ATTATTCAGGT | 16 | 31 |
| | | | | | CTCCA | | |
| 684394 | 1489 | 1504 | 37852 | 37867 | ATTATTCAGGT | 13 | 31 |
| | | | | | CTCCA | | |
| 885435 | 219 | 234 | 7254 | 7269 | GCGGCAAGTTC | 84* | 1765 |
| | | | | | TGCTC | | |
| 885455 | 257 | 272 | 7292 | 7307 | GGAGGACGATG | 10* | 1766 |
| | | | | | ATACT | | |
| 885475 | 354 | 369 | 8845 | 8860 | GTGCTACAGTT | 50 | 1767 |
| | | | | | CTGCC | | |
| 885495 | 562 | 577 | 36925 | 36940 | AGCACTCATCA | 52 | 1768 |
| | | | | | CGCAC | | |
| 885513 | 591 | 606 | 36954 | 36969 | TCCGGGTGCCT | 72 | 1769 |
| | | | | | CACCG | | |
| 885533 | 620 | 635 | 36983 | 36998 | CGTAGGAGTAA | 68 | 1770 |
| | | | | | TCCGA | | |
| 885553 | 729 | 744 | 37092 | 37107 | CTCAGACAGAC | 153 | 1771 |
| | | | | | CGTCT | | |
| 885573 | 891 | 906 | 37254 | 37269 | GTTTTATAAAC | 20 | 1772 |
| | | | | | CGGAG | | |
| 885593 | 992 | 1007 | 37355 | 37370 | AAAGTTCCTTA | 49 | 1773 |
| | | | | | GCTAC | | |
| 885613 | 1086 | 1101 | 37449 | 37464 | GGGCGAGATGG | 64 | 1774 |
| | | | | | AGTTA | | |
| 885633 | 1206 | 1221 | 37569 | 37584 | GGATGCACTGG | 50 | 1775 |
| | | | | | GTCAC | | |
| 885653 | 1241 | 1256 | 37604 | 37619 | TTCACACAGAG | 32 | 1776 |
| | | | | | GTTCG | | |
| 885673 | 1314 | 1329 | 37677 | 37692 | AGTATGCCAAT | 29 | 1777 |
| | | | | | GCCAC | | |
| 885693 | 1347 | 1362 | 37710 | 37725 | ATGTGTGACGA | 36 | 1778 |
| | | | | | AGATA | | |
| 885712 | 1436 | 1451 | 37799 | 37814 | AGTGAGTTGTT | 39 | 1779 |
| | | | | | TAGAT | | |
| 885730 | 1582 | 1597 | 37945 | 37960 | GGAGTGATGAA | 35 | 1780 |
| | | | | | GGCTT | | |
| 885750 | 1640 | 1655 | 38003 | 38018 | TCACGGTCCCA | 85 | 1781 |
| | | | | | AGGAG | | |
| 885769 | 1706 | 1721 | 38069 | 38084 | TACAAGTCATT | 32 | 1782 |
| | | | | | GCCAG | | |
| 885788 | N/A | N/A | 5460 | 5475 | GGCTGCGCGCG | 105 | 1783 |
| | | | | | CGCGA | | |
| 885808 | N/A | N/A | 5545 | 5560 | CAGCTGTCCCG | 92 | 1784 |
| | | | | | ATCCT | | |
| 885828 | N/A | N/A | 7159 | 7174 | GGAGGGTCCCG | 192 | 1785 |
| | | | | | CGCAC | | |
| 885848 | N/A | N/A | 7197 | 7212 | CGAACGCACTG | 101 | 1786 |
| | | | | | GGCCG | | |
| 885908 | N/A | N/A | 32764 | 32779 | GGAGTCCCCTC | 73 | 1787 |
| | | | | | TATTC | | |
| 885928 | N/A | N/A | 3069 | 3084 | TGCATTAGGGT | 47 | 1788 |
| | | | | | TTCTA | | |
| 885948 | N/A | N/A | 4069 | 4084 | GGCTCCAACAA | 74 | 1789 |
| | | | | | ACCTA | | |
| 885968 | N/A | N/A | 4746 | 4761 | CCAGACTACCA | 45 | 1790 |
| | | | | | CCGAA | | |
| 885985 | N/A | N/A | 5381 | 5396 | CGCTGCAGTAG | 32 | 1791 |
| | | | | | GGTGT | | |
| 886005 | N/A | N/A | 6158 | 6173 | GGACATGCATG | 26 | 1792 |
| | | | | | GCTGT | | |
| 886025 | N/A | N/A | 6601 | 6616 | GCGCAGACTCT | 151 | 1793 |
| | | | | | GGCGG | | |
| 886045 | N/A | N/A | 7345 | 7360 | GGCACTCACGC | 112 | 1794 |
| | | | | | TGACG | | |
| 886065 | N/A | N/A | 7933 | 7948 | GCTCATCTTCA | 35 | 1795 |
| | | | | | TCGCC | | |
| 886085 | N/A | N/A | 8893 | 8908 | CCGTTTGGTGA | 73 | 1796 |
| | | | | | TGATG | | |
| 886105 | N/A | N/A | 9363 | 9378 | AGGCAGCCAGT | 49 | 1797 |
| | | | | | CTTGT | | |
| 886125 | N/A | N/A | 9842 | 9857 | TGTATTTCCGT | 41 | 1798 |
| | | | | | GGCCT | | |
| 886145 | N/A | N/A | 10445 | 10460 | ACGGAGACTCC | 85 | 1799 |
| | | | | | CATCC | | |
| 886165 | N/A | N/A | 10903 | 10918 | AGCAACGAGGC | 44 | 1800 |
| | | | | | AGATT | | |
| 886185 | N/A | N/A | 11713 | 11728 | AACAACATGAG | 63 | 1801 |
| | | | | | TGGCA | | |
| 886205 | N/A | N/A | 12053 | 12068 | GGCTCGGGACC | 48 | 1802 |
| | | | | | ATCAA | | |
| 886225 | N/A | N/A | 12760 | 12775 | CACCAGGCTTA | 87 | 1803 |
| | | | | | CAGAG | | |
| 886245 | N/A | N/A | 13624 | 13639 | CACAGGTGGGC | 100 | 1804 |
| | | | | | AACAG | | |
| 886265 | N/A | N/A | 14153 | 14168 | CTTTATCCCAT | 86 | 1805 |
| | | | | | TACCC | | |
| 886285 | N/A | N/A | 14585 | 14600 | AAGAATCCCGT | 72 | 1806 |
| | | | | | CACCC | | |
| 886305 | N/A | N/A | 15533 | 15548 | GTAGTAAGTGG | 36 | 1807 |
| | | | | | TCATC | | |
| 886324 | N/A | N/A | 16185 | 16200 | AATGCAAGGGA | 47 | 1808 |
| | | | | | TGTTT | | |
| 886344 | N/A | N/A | 16927 | 16942 | AGCGATCCTGC | 42 | 1809 |
| | | | | | TCCCA | | |
| 886364 | N/A | N/A | 17650 | 17665 | TCTGAACCCTG | 64 | 1810 |
| | | | | | TTCCC | | |
| 886384 | N/A | N/A | 18678 | 18693 | AGGTCCTACCT | 47 | 1811 |
| | | | | | CAATG | | |
| 886404 | N/A | N/A | 19048 | 19063 | CTGCATCAGTG | 70 | 1812 |
| | | | | | GAGAA | | |
| 886424 | N/A | N/A | 19524 | 19539 | CAGAGCTAGTT | 36 | 1813 |
| | | | | | TGTCA | | |
| 886443 | N/A | N/A | 19935 | 19950 | CTCCATCCTAA | 110 | 1814 |
| | | | | | ACAAT | | |
| 886463 | N/A | N/A | 20480 | 20495 | GGGAAGCTCGA | 97 | 1815 |
| | | | | | GTTGC | | |
| 886483 | N/A | N/A | 21461 | 21476 | AACCTAGTGTG | 28 | 1816 |
| | | | | | ACACC | | |
| 886502 | N/A | N/A | 22393 | 22408 | TGCAAATAACC | 81 | 1817 |
| | | | | | CCACC | | |
| 886522 | N/A | N/A | 23029 | 23044 | TACTAAGAGTC | 94 | 1818 |
| | | | | | AGGAT | | |
| 886542 | N/A | N/A | 23808 | 23823 | CACTAGCAACC | 53 | 1819 |
| | | | | | AAGGA | | |
| 886562 | N/A | N/A | 25057 | 25072 | CCAGATAATTC | 40 | 1820 |
| | | | | | CTCGG | | |
| 886582 | N/A | N/A | 26166 | 26181 | ACCTACTGCTT | 78 | 1821 |
| | | | | | TGAGC | | |
| 886602 | N/A | N/A | 26907 | 26922 | TGTTTTCATGA | 11 | 1822 |
| | | | | | GCCCA | | |
| 886622 | N/A | N/A | 27501 | 27516 | CCAGACGGGAT | 81 | 1823 |
| | | | | | GAAGG | | |
| 886642 | N/A | N/A | 28525 | 28540 | CACAACTTACC | 86 | 1824 |
| | | | | | AGCAA | | |
| 886662 | N/A | N/A | 28953 | 28968 | CTGATAACTAC | 74 | 1825 |
| | | | | | TTTGC | | |
| 886682 | N/A | N/A | 29367 | 29382 | ACAGACATGTA | 63 | 1826 |
| | | | | | AGAGC | | |
| 886702 | N/A | N/A | 29932 | 29947 | ATTGAGTAAGG | 53 | 1827 |
| | | | | | GTAAC | | |
| 886722 | N/A | N/A | 30641 | 30656 | TTAAAGCCGAA | 73 | 1828 |
| | | | | | ACAGC | | |
| 886742 | N/A | N/A | 31148 | 31163 | TTCCAGTGCAA | 66 | 1829 |
| | | | | | CATCC | | |
| 886762 | N/A | N/A | 31540 | 31555 | CCGGAGACTAC | 53 | 1830 |
| | | | | | ACAGA | | |
| 886782 | N/A | N/A | 32365 | 32380 | GGACAGTTTAA | 37 | 1831 |
| | | | | | TGGCT | | |
| 886802 | N/A | N/A | 33316 | 33331 | CTGATTTGGGC | 47 | 1832 |
| | | | | | ATGGC | | |
| 886822 | N/A | N/A | 33746 | 33761 | GGGAACACAGC | 111 | 1833 |
| | | | | | GATGT | | |
| 886842 | N/A | N/A | 34293 | 34308 | AGTGAGACATG | 21 | 1834 |
| | | | | | GCTCC | | |
| 886862 | N/A | N/A | 34818 | 34833 | AGTAAGTGGAC | 68 | 1835 |
| | | | | | TGTGA | | |
| 886882 | N/A | N/A | 35266 | 35281 | TCTAACCAGAT | 80 | 1836 |
| | | | | | CTGGC | | |
| 886902 | N/A | N/A | 35682 | 35697 | TGTCAAGAGAG | 95 | 1837 |
| | | | | | CCACA | | |
| 886922 | N/A | N/A | 36273 | 36288 | TGGGAAGCCAC | 72 | 1838 |
| | | | | | GCTGC | | |
| 886942 | N/A | N/A | 36691 | 36706 | CCTTAATACCT | 85 | 1839 |
| | | | | | GAGGG | | |

TABLE 34
Percent control of human PMP22 RNA with
3-10-3 cEt gapmers

| | SEQ | SEQ | | | | |
|---|---|---|---|---|---|---|
| | ID | ID | | PMP22 | PMP22 | |
| | NO: | NO: | | (% | (% | |
| Com- | 3 | 3 | | UTC) | UTC) | SEQ |
| pound | Start | Stop | Sequence | RTS | RTS | ID |
| ID | Site | Site | (5′ to 3′) | 35670 | 35667 | NO |
| 885826 | 161 | 176 | CAGCGGAGTTTCTGCA | 71 | 39* | 1840 |

### Example 5: Effect of Modified Oligonucleotides on Human PMP22 RNA In Vitro, Single Dose

[0373] Modified oligonucleotides in the tables below are 3-10-3 cEt gapmers. The modified oligonucleotides are 16 nucleosides in length, wherein the central gap segment consists of ten 2′-β-D-deoxynucleosides and is flanked by wing segments at the 5′ end and the 3′ end having three nucleosides each. Each nucleoside of the 5′ wing segment and each nucleoside in the 3′ wing segment is a cEt nucleoside. All internucleoside linkages throughout the modified oligonucleotide are phosphorothioate (P═S) linkages. All cytosine residues throughout the modified oligonucleotide are 5-methylcytosines.

[0374] “Start site” indicates the 5′-most nucleoside to which the modified oligonucleotide is targeted in the human gene sequence. “Stop site” indicates the 3′-most nucleoside to which the modified oligonucleotide is targeted human gene sequence. Each modified oligonucleotide listed in the Tables below is targeted to either SEQ ID NO: 1 or SEQ ID NO: 2. ‘N/A’ indicates that the modified oligonucleotide does not target that particular gene sequence with 100% complementarity.

[0375] Cultured A-549 cells at a density of 15,000 cells per well were treated using electroporation with 4,000 nM of modified oligonucleotide. After a treatment period of approximately 24 hours, total RNA was isolated from the cells and PMP22 RNA levels were measured by quantitative real-time RTPCR. Human PMP22 primer probe set RTS35670, described herein above, was used to measure RNA levels. PMP22 RNA levels were adjusted according to total RNA content, as measured by RIBOGREEN®. Results are presented in the tables below as percent PMP22 RNA levels relative to untreated control cells. The modified oligonucleotides with percent control values marked with an asterisk (*) target the amplicon region of the primer probe set. Additional assays may be used to measure the potency and efficacy of the modified oligonucleotides targeting the amplicon region. ‘N.D.’ indicates that the % UTC is not determined for that particular modified oligonucleotide in that particular experiment.

TABLE 35
Percent control of human PMP22 RNA with
3-10-3 cEt gapmers

| | SEQ | SEQ | SEQ | SEQ | | | |
|---|---|---|---|---|---|---|---|
| | ID | ID | ID | ID | | | |
| Com- | NO: 1 | NO: 1 | NO: 2 | NO: 2 | | PMP22 | SEQ |
| pound | Start | Stop | Start | Stop | Sequence | (% | ID |
| ID | Site | Site | Site | Site | (5′ to 3′) | UTC) | NO |
| 684394 | 1489 | 1504 | 37852 | 37867 | ATTATTCAGGT | 25 | 31 |
| | | | | | CTCCA | | |
| 923817 | N/A | N/A | 3505 | 3520 | GAGCATATCTA | 89 | 1841 |
| | | | | | ACTCA | | |
| 923827 | N/A | N/A | 4170 | 4185 | TGCATTTACAG | 40 | 1842 |
| | | | | | TGCCC | | |
| 923837 | N/A | N/A | 5946 | 5961 | ATTAAGCCGAT | 81 | 1843 |
| | | | | | GGCAG | | |
| 923847 | N/A | N/A | 7620 | 7635 | TGTCAAATGAA | 45 | 1844 |
| | | | | | GGTCG | | |
| 923857 | N/A | N/A | 8998 | 9013 | AACGACATTCT | 32 | 1845 |
| | | | | | GGCTT | | |
| 923867 | N/A | N/A | 9499 | 9514 | AAATACGATCT | 44 | 1846 |
| | | | | | TCTGG | | |
| 923877 | N/A | N/A | 9722 | 9737 | TCTTAACATCA | 25 | 1847 |
| | | | | | ATCGC | | |
| 923887 | N/A | N/A | 10451 | 10466 | GCGAGTACGGA | 186 | 1848 |
| | | | | | GACTC | | |
| 923896 | N/A | N/A | 10757 | 10772 | ACCAACTGACA | 38 | 1849 |
| | | | | | GCTAT | | |
| 923906 | N/A | N/A | 11268 | 11283 | ACAAGTTAAAT | 16 | 1850 |
| | | | | | GGTTC | | |
| 923916 | N/A | N/A | 11889 | 11904 | CATTTAGAAAA | 122 | 1851 |
| | | | | | ACGAG | | |
| 923926 | N/A | N/A | 13842 | 13857 | CCGATGGGCCT | 72 | 1852 |
| | | | | | TGTTA | | |
| 923936 | N/A | N/A | 14033 | 14048 | CAATAGTCTCT | 82 | 1853 |
| | | | | | GGTAC | | |
| 923946 | N/A | N/A | 14938 | 14953 | AATAGCAGGGC | 82 | 1854 |
| | | | | | AAATG | | |
| 923956 | N/A | N/A | 15723 | 15738 | CAGCGATGATA | 38 | 1855 |
| | | | | | GGAGA | | |
| 923966 | N/A | N/A | 16042 | 16057 | TCAGAGAAACC | 107 | 1856 |
| | | | | | CTAAG | | |
| 923976 | N/A | N/A | 16689 | 16704 | GAGCATGTTCC | 44 | 1857 |
| | | | | | ACTAC | | |
| 923986 | N/A | N/A | 17749 | 17764 | CAATATCTCCT | 91 | 1858 |
| | | | | | GGCAT | | |
| 923996 | N/A | N/A | 19084 | 19099 | AATGACGGGAA | 69 | 1859 |
| | | | | | AGGCA | | |
| 924006 | N/A | N/A | 19170 | 19185 | TTCAAACGGAT | 90 | 1860 |
| | | | | | TTATC | | |
| 924016 | N/A | N/A | 19265 | 19280 | GCATTGTACGA | 34 | 1861 |
| | | | | | TGAAG | | |
| 924026 | N/A | N/A | 19729 | 19744 | CACAAAGGCGA | 89 | 1862 |
| | | | | | TGAAG | | |
| 924036 | N/A | N/A | 21347 | 21362 | GAACTTATGTT | 44 | 1863 |
| | | | | | GAGTA | | |
| 924046 | N/A | N/A | 21536 | 21551 | AATAATGATTC | 124 | 1864 |
| | | | | | GAGTT | | |
| 924056 | N/A | N/A | 23040 | 23055 | CTCTATTGACT | 97 | 1865 |
| | | | | | TACTA | | |
| 924066 | N/A | N/A | 23519 | 23534 | TTCAAGTGCTT | 67 | 1866 |
| | | | | | ATCTA | | |
| 924076 | N/A | N/A | 26402 | 26417 | CTACGAGACCT | 78 | 1867 |
| | | | | | CACAT | | |
| 924086 | N/A | N/A | 27617 | 27632 | TATAGGTATGG | 150 | 1868 |
| | | | | | AAATC | | |
| 924096 | N/A | N/A | 28847 | 28862 | TCAGTATTCAC | 110 | 1869 |
| | | | | | CTCTG | | |
| 924106 | N/A | N/A | 30167 | 30182 | TTTGAGCGAGG | 60 | 1870 |
| | | | | | CACAT | | |
| 924116 | N/A | N/A | 30647 | 30662 | AAGAACTTAAA | 46 | 1871 |
| | | | | | GCCGA | | |
| 924126 | N/A | N/A | 30913 | 30928 | AAGTCATGCGC | 51 | 1872 |
| | | | | | TTTTA | | |
| 924136 | N/A | N/A | 32699 | 32714 | GCCGAGGAAAC | 64 | 1873 |
| | | | | | ACAAT | | |
| 924146 | N/A | N/A | 35055 | 35070 | CGTGATAAGCA | 65 | 1874 |
| | | | | | GTAAA | | |
| 924156 | N/A | N/A | 3018 | 3033 | AGTATATATCC | 40 | 1875 |
| | | | | | ACCTT | | |
| 924166 | N/A | N/A | 5019 | 5034 | ACTAATAGAGG | 60 | 1876 |
| | | | | | GCAGC | | |
| 924176 | N/A | N/A | 5765 | 5780 | GTCTTATAGAC | 103 | 1877 |
| | | | | | CATAA | | |
| 924186 | N/A | N/A | 6326 | 6341 | ACCGAAGGGAG | 144 | 1878 |
| | | | | | TAGAT | | |
| 924196 | N/A | N/A | 6999 | 7014 | CAACGGAACAT | 97 | 1879 |
| | | | | | CTTTT | | |
| 924206 | N/A | N/A | 7838 | 7853 | AGCTTTACTAA | 100 | 1880 |
| | | | | | CAATG | | |
| 924216 | N/A | N/A | 8605 | 8620 | ACACAGAAACG | 119 | 1881 |
| | | | | | ATTAT | | |
| 924226 | N/A | N/A | 9213 | 9228 | GGCTTAGCTAT | 65 | 1882 |
| | | | | | CATAC | | |
| 924236 | N/A | N/A | 9986 | 10001 | AGCAACTGGAT | 145 | 1883 |
| | | | | | TATGC | | |
| 924246 | N/A | N/A | 10904 | 10919 | AAGCAACGAGG | 83 | 1884 |
| | | | | | CAGAT | | |
| 924256 | N/A | N/A | 11168 | 11183 | TGTTAAACTCA | 81 | 1885 |
| | | | | | ATCAA | | |
| 924266 | N/A | N/A | 11977 | 11992 | TATCATAACGA | 114 | 1886 |
| | | | | | ATATC | | |
| 924276 | N/A | N/A | 13647 | 13662 | GACAAACGAGG | 56 | 1887 |
| | | | | | AAGCA | | |
| 924286 | N/A | N/A | 14550 | 14565 | TACCGATGCAT | 88 | 1888 |
| | | | | | TTCTA | | |
| 924296 | N/A | N/A | 15427 | 15442 | CCTTAGACAAT | 99 | 1889 |
| | | | | | GGAGG | | |
| 924306 | N/A | N/A | 16183 | 16198 | TGCAAGGGATG | 97 | 1890 |
| | | | | | TTTTC | | |
| 924316 | N/A | N/A | 17566 | 17581 | TCGGTATAGAG | 56 | 1891 |
| | | | | | GAATG | | |
| 924326 | N/A | N/A | 18920 | 18935 | CGCATTATGGA | 48 | 1892 |
| | | | | | AATGA | | |
| 924336 | N/A | N/A | 19406 | 19421 | GGATAATAGTA | 55 | 1893 |
| | | | | | AGCTG | | |
| 924346 | N/A | N/A | 20357 | 20372 | ACCTAGTGAGT | 144 | 1894 |
| | | | | | TAAGG | | |
| 924356 | N/A | N/A | 21433 | 21448 | GGCTAAACTAT | 99 | 1895 |
| | | | | | AGATT | | |
| 924366 | N/A | N/A | 22391 | 22406 | CAAATAACCCC | 170 | 1896 |
| | | | | | ACCTA | | |
| 924376 | N/A | N/A | 22829 | 22844 | TGCAAGATTCA | 82 | 1897 |
| | | | | | AGAGC | | |
| 924386 | N/A | N/A | 23167 | 23182 | TTGCAACGAAG | 94 | 1898 |
| | | | | | AAGAG | | |
| 924396 | N/A | N/A | 24439 | 24454 | AGTCAAGATAC | 63 | 1899 |
| | | | | | CACCT | | |
| 924406 | N/A | N/A | 25223 | 25238 | ACACACATGGG | 69 | 1900 |
| | | | | | ACAGC | | |
| 924416 | N/A | N/A | 26074 | 26089 | ATGCATTAAGA | 93 | 1901 |
| | | | | | TAGTA | | |
| 924426 | N/A | N/A | 26784 | 26799 | AAGAAAATGAC | 87 | 1902 |
| | | | | | GGCTA | | |
| 924436 | N/A | N/A | 27183 | 27198 | CCATATGTAAT | 93 | 1903 |
| | | | | | GGCTT | | |
| 924446 | N/A | N/A | 27844 | 27859 | TGTTAAAGAGG | 154 | 1904 |
| | | | | | GCCTG | | |
| 924456 | N/A | N/A | 29329 | 29344 | TGCAAGATGTA | 167 | 1905 |
| | | | | | AGATG | | |
| 924466 | N/A | N/A | 29929 | 29944 | GAGTAAGGGTA | 101 | 1906 |
| | | | | | ACTCT | | |
| 924476 | N/A | N/A | 30243 | 30258 | GTAAAATAACG | 87 | 1907 |
| | | | | | AGCCT | | |
| 924486 | N/A | N/A | 30723 | 30738 | ACTTAAGGGTT | 157 | 1908 |
| | | | | | CTTAT | | |
| 924496 | N/A | N/A | 30824 | 30839 | AGCAAGAGTGG | 68 | 1909 |
| | | | | | ATTAG | | |
| 924506 | N/A | N/A | 31169 | 31184 | GTGGAAAGATC | 73 | 1910 |
| | | | | | CTGCA | | |
| 924516 | N/A | N/A | 32371 | 32386 | GATTAGGGACA | 131 | 1911 |
| | | | | | GTTTA | | |
| 924526 | N/A | N/A | 33693 | 33708 | AGCTAACAGTA | 125 | 1912 |
| | | | | | TTGAA | | |
| 924536 | N/A | N/A | 34215 | 34230 | GAATTTCGAGA | 100 | 1913 |
| | | | | | GAGGG | | |
| 924546 | N/A | N/A | 34830 | 34845 | CCAAATACCCC | 89 | 1914 |
| | | | | | TAGTA | | |
| 924556 | N/A | N/A | 35127 | 35142 | CTAACTACACA | 110 | 1915 |
| | | | | | GCTTA | | |
| 924566 | N/A | N/A | 35737 | 35752 | TGTTAAGCCTG | 117 | 1916 |
| | | | | | TCCTC | | |
| 924576 | N/A | N/A | 36434 | 36449 | GATTAAGCTCC | 76 | 1917 |
| | | | | | ATGCA | | |

TABLE 36
Percent control of human PMP22 RNA with
3-10-3 cEt gapmers

| | SEQ | SEQ | SEQ | SEQ | | | |
|---|---|---|---|---|---|---|---|
| | ID | ID | ID | ID | | | |
| Com- | NO: 1 | NO: 1 | NO: 2 | NO: 2 | | PMP22 | SEQ |
| pound | Start | Stop | Start | Stop | Sequence | (% | ID |
| ID | Site | Site | Site | Site | (5′ to 3′) | UTC) | NO |
| 684394 | 1489 | 1504 | 37852 | 37867 | ATTATTCAGGT | 26 | 31 |
| | | | | | CTCCA | | |
| 923818 | N/A | N/A | 3546 | 3561 | AACATACTCAG | 41 | 1918 |
| | | | | | GACTG | | |
| 923828 | N/A | N/A | 4185 | 4200 | TGTACTTGTAA | 49 | 1919 |
| | | | | | ACACT | | |
| 923838 | N/A | N/A | 5950 | 5965 | TTGAATTAAGC | 60 | 1920 |
| | | | | | CGATG | | |
| 923848 | N/A | N/A | 7632 | 7647 | GTTAAACAATC | 69 | 1921 |
| | | | | | TTGTC | | |
| 923858 | N/A | N/A | 8999 | 9014 | CAACGACATTC | 48 | 1922 |
| | | | | | TGGCT | | |
| 923868 | N/A | N/A | 9500 | 9515 | GAAATACGATC | 29 | 1923 |
| | | | | | TTCTG | | |
| 923878 | N/A | N/A | 9723 | 9738 | CTCTTAACATC | 14 | 1924 |
| | | | | | AATCG | | |
| 923888 | N/A | N/A | 10452 | 10467 | AGCGAGTACGG | 58 | 1925 |
| | | | | | AGACT | | |
| 923897 | N/A | N/A | 10764 | 10779 | TTCTAGCACCA | 72 | 1926 |
| | | | | | ACTGA | | |
| 923907 | N/A | N/A | 11269 | 11284 | GACAAGTTAAA | 58 | 1927 |
| | | | | | TGGTT | | |
| 923917 | N/A | N/A | 12573 | 12588 | AATCATGGATG | 81 | 1928 |
| | | | | | AGATG | | |
| 923927 | N/A | N/A | 13851 | 13866 | AGGTAGATTCC | 36 | 1929 |
| | | | | | GATGG | | |
| 923937 | N/A | N/A | 14034 | 14049 | GCAATAGTCTC | 52 | 1930 |
| | | | | | TGGTA | | |
| 923947 | N/A | N/A | 14939 | 14954 | CAATAGCAGGG | 76 | 1931 |
| | | | | | CAAAT | | |
| 923957 | N/A | N/A | 15731 | 15746 | TTTGAAGACAG | 47 | 1932 |
| | | | | | CGATG | | |
| 923967 | N/A | N/A | 16064 | 16079 | TACTAATTCCT | 94 | 1933 |
| | | | | | GGGTA | | |
| 923977 | N/A | N/A | 17105 | 17120 | GACTATGACCA | 107 | 1934 |
| | | | | | CAAAC | | |
| 923987 | N/A | N/A | 17750 | 17765 | ACAATATCTCC | 49 | 1935 |
| | | | | | TGGCA | | |
| 923997 | N/A | N/A | 19085 | 19100 | AAATGACGGGA | 34 | 1936 |
| | | | | | AAGGC | | |
| 924007 | N/A | N/A | 19171 | 19186 | TTTCAAACGGA | 92 | 1937 |
| | | | | | TTTAT | | |
| 924017 | N/A | N/A | 19266 | 19281 | TGCATTGTACG | 40 | 1938 |
| | | | | | ATGAA | | |
| 924027 | N/A | N/A | 19730 | 19745 | TCACAAAGGCG | 91 | 1939 |
| | | | | | ATGAA | | |
| 924037 | N/A | N/A | 21464 | 21479 | TCAAACCTAGT | 85 | 1940 |
| | | | | | GTGAC | | |
| 924047 | N/A | N/A | 21537 | 21552 | AAATAATGATT | 106 | 1941 |
| | | | | | CGAGT | | |
| 924057 | N/A | N/A | 23045 | 23060 | CAGCACTCTAT | 58 | 1942 |
| | | | | | TGACT | | |
| 924067 | N/A | N/A | 23531 | 23546 | ACACTATATGT | 57 | 1943 |
| | | | | | GTTCA | | |
| 924077 | N/A | N/A | 26404 | 26419 | TACTACGAGAC | 82 | 1944 |
| | | | | | CTCAC | | |
| 924087 | N/A | N/A | 27618 | 27633 | CTATAGGTATG | 93 | 1945 |
| | | | | | GAAAT | | |
| 924097 | N/A | N/A | 29036 | 29051 | AGTAGAATCTA | 76 | 1946 |
| | | | | | GGAAC | | |
| 924107 | N/A | N/A | 30318 | 30333 | ACTCAACCGTC | 85 | 1947 |
| | | | | | CCTGT | | |
| 924117 | N/A | N/A | 30678 | 30693 | ATGTAATGATG | 47 | 1948 |
| | | | | | TTGCT | | |
| 924127 | N/A | N/A | 30916 | 30931 | ACAAAGTCATG | 81 | 1949 |
| | | | | | CGCTT | | |
| 924137 | N/A | N/A | 33221 | 33236 | CTGAACAGGAT | 62 | 1950 |
| | | | | | GGCAC | | |
| 924147 | N/A | N/A | 35062 | 35077 | GCTTAACCGTG | 72 | 1951 |
| | | | | | ATAAG | | |
| 924157 | N/A | N/A | 3367 | 3382 | GTTTAATCAAT | 60 | 1952 |
| | | | | | AACCA | | |
| 924167 | N/A | N/A | 5023 | 5038 | TCCCACTAATA | 136 | 1953 |
| | | | | | GAGGG | | |
| 924177 | N/A | N/A | 5834 | 5849 | AGCAAGGCGAG | 73 | 1954 |
| | | | | | AACTG | | |
| 924187 | N/A | N/A | 6327 | 6342 | GACCGAAGGGA | 83 | 1955 |
| | | | | | GTAGA | | |
| 924197 | N/A | N/A | 7001 | 7016 | TGCAACGGAAC | 117 | 1956 |
| | | | | | ATCTT | | |
| 924207 | N/A | N/A | 7900 | 7915 | ATCTAATGGGC | 76 | 1957 |
| | | | | | TGGAC | | |
| 924217 | N/A | N/A | 8709 | 8724 | CGAAAAGCACC | 86 | 1958 |
| | | | | | CGCAT | | |
| 924227 | N/A | N/A | 9463 | 9478 | GCTTAGGGTTT | 103 | 1959 |
| | | | | | TGCAA | | |
| 924237 | N/A | N/A | 10057 | 10072 | TTATAATGCTT | 88 | 1960 |
| | | | | | CAGCT | | |
| 924247 | N/A | N/A | 10909 | 10924 | ACGGAAAGCAA | 40 | 1961 |
| | | | | | CGAGG | | |
| 924257 | N/A | N/A | 11350 | 11365 | ACAAATCGATG | 38 | 1962 |
| | | | | | TCAAT | | |
| 924267 | N/A | N/A | 11981 | 11996 | ACAATATCATA | 54 | 1963 |
| | | | | | ACGAA | | |
| 924277 | N/A | N/A | 13648 | 13663 | TGACAAACGAG | 76 | 1964 |
| | | | | | GAAGC | | |
| 924287 | N/A | N/A | 14553 | 14568 | ATATACCGATG | 91 | 1965 |
| | | | | | CATTT | | |
| 924297 | N/A | N/A | 15621 | 15636 | ACACAACCTAT | 108 | 1966 |
| | | | | | TGATA | | |
| 924307 | N/A | N/A | 16465 | 16480 | TAATAAGTTCC | 92 | 1967 |
| | | | | | CCATC | | |
| 924317 | N/A | N/A | 17772 | 17787 | AGCCGAGGTAA | 93 | 1968 |
| | | | | | TTTCT | | |
| 924327 | N/A | N/A | 18921 | 18936 | ACGCATTATGG | 42 | 1969 |
| | | | | | AAATG | | |
| 924337 | N/A | N/A | 19407 | 19422 | TGGATAATAGT | 40 | 1970 |
| | | | | | AAGCT | | |
| 924347 | N/A | N/A | 20362 | 20377 | CTACAACCTAG | 97 | 1971 |
| | | | | | TGAGT | | |
| 924357 | N/A | N/A | 21485 | 21500 | TACAAACCTGT | 86 | 1972 |
| | | | | | TCTAT | | |
| 924367 | N/A | N/A | 22394 | 22409 | GTGCAAATAAC | 99 | 1973 |
| | | | | | CCCAC | | |
| 924377 | N/A | N/A | 22830 | 22845 | GTGCAAGATTC | 97 | 1974 |
| | | | | | AAGAG | | |
| 924387 | N/A | N/A | 23324 | 23339 | AAAGAGTAAGG | 62 | 1975 |
| | | | | | TGCAC | | |
| 924397 | N/A | N/A | 24685 | 24700 | TACTAAGTTCC | 110 | 1976 |
| | | | | | TGGAT | | |
| 924407 | N/A | N/A | 25445 | 25460 | ATATAATAACA | 103 | 1977 |
| | | | | | TGGCC | | |
| 924417 | N/A | N/A | 26227 | 26242 | CTCGAATCAAA | 54 | 1978 |
| | | | | | TCAGA | | |
| 924427 | N/A | N/A | 26785 | 26800 | TAAGAAAATGA | 74 | 1979 |
| | | | | | CGGCT | | |
| 924437 | N/A | N/A | 27185 | 27200 | TGCCATATGTA | 128 | 1980 |
| | | | | | ATGGC | | |
| 924447 | N/A | N/A | 27927 | 27942 | CACTAGGAGTT | 98 | 1981 |
| | | | | | AAAGT | | |
| 924457 | N/A | N/A | 29341 | 29356 | TGCTAGGCAGA | 87 | 1982 |
| | | | | | ATGCA | | |
| 924467 | N/A | N/A | 30000 | 30015 | CTAAAACGAGT | 67 | 1983 |
| | | | | | GAGAA | | |
| 924477 | N/A | N/A | 30244 | 30259 | AGTAAAATAAC | 61 | 1984 |
| | | | | | GAGCC | | |
| 924487 | N/A | N/A | 30724 | 30739 | GACTTAAGGGT | 49 | 1985 |
| | | | | | TCTTA | | |
| 924497 | N/A | N/A | 31079 | 31094 | AACAACGGAGG | 53 | 1986 |
| | | | | | ACAGG | | |
| 924507 | N/A | N/A | 31208 | 31223 | TCCAAATAGAG | 107 | 1987 |
| | | | | | TTCCT | | |
| 924517 | N/A | N/A | 32380 | 32395 | TTACAGTGGGA | 82 | 1988 |
| | | | | | TTAGG | | |
| 924527 | N/A | N/A | 33888 | 33903 | GGTTAGTGAGT | 65 | 1989 |
| | | | | | CAAGA | | |
| 924537 | N/A | N/A | 34217 | 34232 | TGGAATTTCGA | 53 | 1990 |
| | | | | | GAGAG | | |
| 924547 | N/A | N/A | 34868 | 34883 | CAAGACAGTTA | 91 | 1991 |
| | | | | | ATGTC | | |
| 924557 | N/A | N/A | 35129 | 35144 | GACTAACTACA | 99 | 1992 |
| | | | | | CAGCT | | |
| 924567 | N/A | N/A | 35759 | 35774 | GAATACGCCAC | 103 | 1993 |
| | | | | | ATGAA | | |
| 924577 | N/A | N/A | 36437 | 36452 | AAGGATTAAGC | 80 | 1994 |
| | | | | | TCCAT | | |

TABLE 37
Percent control of human PMP22 RNA with
3-10-3 cEt gapmers

| | SEQ | SEQ | SEQ | SEQ | | | |
|---|---|---|---|---|---|---|---|
| | ID | ID | ID | ID | | | |
| Com- | NO: 1 | NO: 1 | NO: 2 | NO: 2 | | PMP22 | SEQ |
| pound | Start | Stop | Start | Stop | Sequence | (% | ID |
| ID | Site | Site | Site | Site | (5′ to 3′) | UTC) | NO |
| 684394 | 1489 | 1504 | 37852 | 37867 | ATTATTCAGGT | 28 | 31 |
| | | | | | CTCCA | | |
| 923819 | N/A | N/A | 3627 | 3642 | AGTTAGATTTG | 32 | 1995 |
| | | | | | CTCTA | | |
| 923829 | N/A | N/A | 4186 | 4201 | GTGTACTTGTA | 129 | 1996 |
| | | | | | AACAC | | |
| 923839 | N/A | N/A | 6163 | 6178 | TTAGAGGACAT | 95 | 1997 |
| | | | | | GCATG | | |
| 923849 | N/A | N/A | 7800 | 7815 | CGACATGGGAC | 59 | 1998 |
| | | | | | CTGTG | | |
| 923859 | N/A | N/A | 9001 | 9016 | AGCAACGACAT | 42 | 1999 |
| | | | | | TCTGG | | |
| 923869 | N/A | N/A | 9501 | 9516 | AGAAATACGAT | 84 | 2000 |
| | | | | | CTTCT | | |
| 923879 | N/A | N/A | 9754 | 9769 | ACAAAAGATCA | 97 | 2001 |
| | | | | | TGTGG | | |
| 923889 | N/A | N/A | 10457 | 10472 | TCAGTAGCGAG | 35 | 2002 |
| | | | | | TACGG | | |
| 923898 | N/A | N/A | 11251 | 11266 | CAATGAGCATA | 36 | 2003 |
| | | | | | GTTCA | | |
| 923908 | N/A | N/A | 11860 | 11875 | TCAAAGTCAGT | 55 | 2004 |
| | | | | | TAGTT | | |
| 923918 | N/A | N/A | 12576 | 12591 | TTGAATCATGG | 34 | 2005 |
| | | | | | ATGAG | | |
| 923928 | N/A | N/A | 13852 | 13867 | CAGGTAGATTC | 36 | 2006 |
| | | | | | CGATG | | |
| 923938 | N/A | N/A | 14214 | 14229 | GTTCATATGGC | 41 | 2007 |
| | | | | | TGGCT | | |
| 923948 | N/A | N/A | 14940 | 14955 | TCAATAGCAGG | 48 | 2008 |
| | | | | | GCAAA | | |
| 923958 | N/A | N/A | 15913 | 15928 | AGATTATGGGT | 84 | 2009 |
| | | | | | TGGCT | | |
| 923968 | N/A | N/A | 16067 | 16082 | TCATACTAATT | 46 | 2010 |
| | | | | | CCTGG | | |
| 923978 | N/A | N/A | 17107 | 17122 | TGGACTATGAC | 74 | 2011 |
| | | | | | CACAA | | |
| 923988 | N/A | N/A | 18453 | 18468 | AAAACTAGAGA | 58 | 2012 |
| | | | | | GGGTG | | |
| 923998 | N/A | N/A | 19090 | 19105 | ATAGAAAATGA | 61 | 2013 |
| | | | | | CGGGA | | |
| 924008 | N/A | N/A | 19172 | 19187 | CTTTCAAACGG | 55 | 2014 |
| | | | | | ATTTA | | |
| 924018 | N/A | N/A | 19322 | 19337 | TAAGAATTGCT | 28 | 2015 |
| | | | | | CTTGG | | |
| 924028 | N/A | N/A | 19731 | 19746 | CTCACAAAGGC | 90 | 2016 |
| | | | | | GATGA | | |
| 924038 | N/A | N/A | 21465 | 21480 | ATCAAACCTAG | 91 | 2017 |
| | | | | | TGTGA | | |
| 924048 | N/A | N/A | 21591 | 21606 | TGCAAGCTATT | 69 | 2018 |
| | | | | | ATCTG | | |
| 924058 | N/A | N/A | 23048 | 23063 | ATGCAGCACTC | 134 | 2019 |
| | | | | | TATTG | | |
| 924068 | N/A | N/A | 23537 | 23552 | GTAATGACACT | 58 | 2020 |
| | | | | | ATATG | | |
| 924078 | N/A | N/A | 26405 | 26420 | CTACTACGAGA | 64 | 2021 |
| | | | | | CCTCA | | |
| 924088 | N/A | N/A | 27619 | 27634 | TCTATAGGTAT | 75 | 2022 |
| | | | | | GGAAA | | |
| 924098 | N/A | N/A | 29046 | 29061 | ATCAAAGCCCA | 100 | 2023 |
| | | | | | GTAGA | | |
| 924108 | N/A | N/A | 30322 | 30337 | TAACACTCAAC | 83 | 2024 |
| | | | | | CGTCC | | |
| 924118 | N/A | N/A | 30894 | 30909 | TCGGAATTCTG | 94 | 2025 |
| | | | | | CACTT | | |
| 924128 | N/A | N/A | 30917 | 30932 | GACAAAGTCAT | 85 | 2026 |
| | | | | | GCGCT | | |
| 924138 | N/A | N/A | 33244 | 33259 | ACTTAAGCCAC | 83 | 2027 |
| | | | | | CTTTG | | |
| 924148 | N/A | N/A | 35063 | 35078 | AGCTTAACCGT | 97 | 2028 |
| | | | | | GATAA | | |
| 924158 | N/A | N/A | 3374 | 3389 | CCCAATAGTTT | 54 | 2029 |
| | | | | | AATCA | | |
| 924168 | N/A | N/A | 5227 | 5242 | CTCGAAACCAG | 27 | 2030 |
| | | | | | AGGCG | | |
| 924178 | N/A | N/A | 5835 | 5850 | CAGCAAGGCGA | 96 | 2031 |
| | | | | | GAACT | | |
| 924188 | N/A | N/A | 6397 | 6412 | AGCCAGGACAC | 112 | 2032 |
| | | | | | GAACC | | |
| 924198 | N/A | N/A | 7002 | 7017 | CTGCAACGGAA | 92 | 2033 |
| | | | | | CATCT | | |
| 924208 | N/A | N/A | 8392 | 8407 | TGTTAAACTAA | 109 | 2034 |
| | | | | | GTCAC | | |
| 924218 | N/A | N/A | 8710 | 8725 | GCGAAAAGCAC | 176 | 2035 |
| | | | | | CCGCA | | |
| 924228 | N/A | N/A | 9505 | 9520 | GAGGAGAAATA | 60 | 2036 |
| | | | | | CGATC | | |
| 924238 | N/A | N/A | 10234 | 10249 | CAAGATTAAGC | 69 | 2037 |
| | | | | | ACTGT | | |
| 924248 | N/A | N/A | 10913 | 10928 | CCTCACGGAAA | 60 | 2038 |
| | | | | | GCAAC | | |
| 924258 | N/A | N/A | 11351 | 11366 | CACAAATCGAT | 44 | 2039 |
| | | | | | GTCAA | | |
| 924268 | N/A | N/A | 11982 | 11997 | TACAATATCAT | 62 | 2040 |
| | | | | | AACGA | | |
| 924278 | N/A | N/A | 13760 | 13775 | TAATTAGGTTT | 48 | 2041 |
| | | | | | GTGCT | | |
| 924288 | N/A | N/A | 14554 | 14569 | AATATACCGAT | 90 | 2042 |
| | | | | | GCATT | | |
| 924298 | N/A | N/A | 15646 | 15661 | ACCCAAAGCAT | 89 | 2043 |
| | | | | | TGATC | | |
| 924308 | N/A | N/A | 16468 | 16483 | AGGTAATAAGT | 58 | 2044 |
| | | | | | TCCCC | | |
| 924318 | N/A | N/A | 18137 | 18152 | GCACATCAGGC | 65 | 2045 |
| | | | | | ATGAA | | |
| 924328 | N/A | N/A | 18929 | 18944 | AAAAGAACACG | 83 | 2046 |
| | | | | | CATTA | | |
| 924338 | N/A | N/A | 19408 | 19423 | CTGGATAATAG | 36 | 2047 |
| | | | | | TAAGC | | |
| 924348 | N/A | N/A | 20487 | 20502 | AGATAGTGGGA | 84 | 2048 |
| | | | | | AGCTC | | |
| 924358 | N/A | N/A | 21486 | 21501 | TTACAAACCTG | 115 | 2049 |
| | | | | | TTCTA | | |
| 924368 | N/A | N/A | 22401 | 22416 | AAGGATAGTGC | 55 | 2050 |
| | | | | | AAATA | | |
| 924378 | N/A | N/A | 22906 | 22921 | CACAAGGACAG | 82 | 2051 |
| | | | | | CGAGA | | |
| 924388 | N/A | N/A | 23326 | 23341 | GAAAAGAGTAA | 82 | 2052 |
| | | | | | GGTGC | | |
| 924398 | N/A | N/A | 24688 | 24703 | ACATACTAAGT | 69 | 2053 |
| | | | | | TCCTG | | |
| 924408 | N/A | N/A | 25485 | 25500 | GTTTACATGAT | 65 | 2054 |
| | | | | | CTATG | | |
| 924418 | N/A | N/A | 26242 | 26257 | TGCCATAAGTT | 50 | 2055 |
| | | | | | ATTTC | | |
| 924428 | N/A | N/A | 26832 | 26847 | CACAACATATG | 65 | 2056 |
| | | | | | CTTCT | | |
| 924438 | N/A | N/A | 27493 | 27508 | GATGAAGGCTT | 128 | 2057 |
| | | | | | ACACT | | |
| 924448 | N/A | N/A | 28580 | 28595 | AACTAATCATT | 86 | 2058 |
| | | | | | CCGCA | | |
| 924458 | N/A | N/A | 29428 | 29443 | CTACATCTAGC | 139 | 2059 |
| | | | | | TCTTA | | |
| 924468 | N/A | N/A | 30001 | 30016 | ACTAAAACGAG | 68 | 2060 |
| | | | | | TGAGA | | |
| 924478 | N/A | N/A | 30245 | 30260 | CAGTAAAATAA | 81 | 2061 |
| | | | | | CGAGC | | |
| 924488 | N/A | N/A | 30734 | 30749 | TTACATGAGTG | 64 | 2062 |
| | | | | | ACTTA | | |
| 924498 | N/A | N/A | 31080 | 31095 | TAACAACGGAG | 131 | 2063 |
| | | | | | GACAG | | |
| 924508 | N/A | N/A | 31230 | 31245 | ACGATAAGGGA | 53 | 2064 |
| | | | | | ACCAG | | |
| 924518 | N/A | N/A | 32489 | 32504 | GCTATAGGTTC | 113 | 2065 |
| | | | | | TGAAA | | |
| 924528 | N/A | N/A | 34013 | 34028 | GAAACATGATC | 88 | 2066 |
| | | | | | AGACG | | |
| 924538 | N/A | N/A | 34229 | 34244 | AATATAGTTCG | 53 | 2067 |
| | | | | | ATGGA | | |
| 924548 | N/A | N/A | 34871 | 34886 | ACCCAAGACAG | 95 | 2068 |
| | | | | | TTAAT | | |
| 924558 | N/A | N/A | 35132 | 35147 | AGCGACTAACT | 87 | 2069 |
| | | | | | ACACA | | |
| 924568 | N/A | N/A | 35873 | 35888 | TCCCAATGCAC | 90 | 2070 |
| | | | | | CCGCG | | |
| 924578 | N/A | N/A | 36462 | 36477 | CATTATTGGAG | 57 | 2071 |
| | | | | | TCACG | | |

TABLE 38
Percent control of human PMP22 RNA with
3-10-3 cEt gapmers

| | SEQ | SEQ | SEQ | SEQ | | | |
|---|---|---|---|---|---|---|---|
| | ID | ID | ID | ID | | | |
| Com- | NO: 1 | NO: 1 | NO: 2 | NO: 2 | | PMP22 | SEQ |
| pound | Start | Stop | Start | Stop | Sequence | (% | ID |
| ID | Site | Site | Site | Site | (5′ to 3′) | UTC) | NO |
| 684394 | 1489 | 1504 | 37852 | 37867 | ATTATTCAGGT | 8 | 31 |
| | | | | | CTCCA | | |
| 923820 | N/A | N/A | 3787 | 3802 | TTGTAACTCTG | 14 | 2072 |
| | | | | | ATAGG | | |
| 923830 | N/A | N/A | 4791 | 4806 | TGGATAGCATG | 25 | 2073 |
| | | | | | GTCTG | | |
| 923840 | N/A | N/A | 6164 | 6179 | GTTAGAGGACA | 71 | 2074 |
| | | | | | TGCAT | | |
| 923850 | N/A | N/A | 7803 | 7818 | AGCCGACATGG | 72 | 2075 |
| | | | | | GACCT | | |
| 923860 | N/A | N/A | 9002 | 9017 | CAGCAACGACA | 71 | 2076 |
| | | | | | TTCTG | | |
| 923870 | N/A | N/A | 9502 | 9517 | GAGAAATACGA | 31 | 2077 |
| | | | | | TCTTC | | |
| 923880 | N/A | N/A | 9841 | 9856 | GTATTTCCGTG | 43 | 2078 |
| | | | | | GCCTT | | |
| 923890 | N/A | N/A | 10459 | 10474 | TGTCAGTAGCG | 80 | 2079 |
| | | | | | AGTAC | | |
| 923899 | N/A | N/A | 11252 | 11267 | GCAATGAGCAT | 18 | 2080 |
| | | | | | AGTTC | | |
| 923909 | N/A | N/A | 11862 | 11877 | AGTCAAAGTCA | 33 | 2081 |
| | | | | | GTTAG | | |
| 923919 | N/A | N/A | 12577 | 12592 | CTTGAATCATG | 68 | 2082 |
| | | | | | GATGA | | |
| 923929 | N/A | N/A | 13855 | 13870 | ATTCAGGTAGA | 70 | 2083 |
| | | | | | TTCCG | | |
| 923939 | N/A | N/A | 14221 | 14236 | CCGAGATGTTC | 30 | 2084 |
| | | | | | ATATG | | |
| 923949 | N/A | N/A | 14941 | 14956 | TTCAATAGCAG | 39 | 2085 |
| | | | | | GGCAA | | |
| 923959 | N/A | N/A | 15915 | 15930 | AGAGATTATGG | 27 | 2086 |
| | | | | | GTTGG | | |
| 923969 | N/A | N/A | 16113 | 16128 | ATAGATTCCAG | 40 | 2087 |
| | | | | | GTCAT | | |
| 923979 | N/A | N/A | 17354 | 17369 | GTAGAGTCATC | 44 | 2088 |
| | | | | | TAGAA | | |
| 923989 | N/A | N/A | 18518 | 18533 | ATGATATGCTT | 45 | 2089 |
| | | | | | GCAAT | | |
| 923999 | N/A | N/A | 19091 | 19106 | CATAGAAAATG | 47 | 2090 |
| | | | | | ACGGG | | |
| 924009 | N/A | N/A | 19252 | 19267 | AAGGATATCAA | 68 | 2091 |
| | | | | | TCTCC | | |
| 924019 | N/A | N/A | 19495 | 19510 | CACTTTGACAT | 50 | 2092 |
| | | | | | CCATA | | |
| 924029 | N/A | N/A | 19781 | 19796 | ATTCATGCGGA | 55 | 2093 |
| | | | | | AAGCA | | |
| 924039 | N/A | N/A | 21471 | 21486 | ATTTAGATCAA | 110 | 2094 |
| | | | | | ACCTA | | |
| 924049 | N/A | N/A | 21604 | 21619 | GTTGGATTCGA | 39 | 2095 |
| | | | | | CATGC | | |
| 924059 | N/A | N/A | 23201 | 23216 | AATTGATGTCA | 55 | 2096 |
| | | | | | GTGGG | | |
| 924069 | N/A | N/A | 23538 | 23553 | CGTAATGACAC | 43 | 2097 |
| | | | | | TATAT | | |
| 924079 | N/A | N/A | 26406 | 26421 | ACTACTACGAG | 66 | 2098 |
| | | | | | ACCTC | | |
| 924089 | N/A | N/A | 27620 | 27635 | CTCTATAGGTA | 38 | 2099 |
| | | | | | TGGAA | | |
| 924099 | N/A | N/A | 29051 | 29066 | AGTCAATCAAA | 59 | 2100 |
| | | | | | GCCCA | | |
| 924109 | N/A | N/A | 30325 | 30340 | GTGTAACACTC | 45 | 2101 |
| | | | | | AACCG | | |
| 924119 | N/A | N/A | 30898 | 30913 | ACATTCGGAAT | 74 | 2102 |
| | | | | | TCTGC | | |
| 924129 | N/A | N/A | 31091 | 31106 | TTGACTGGGAT | 73 | 2103 |
| | | | | | TAACA | | |
| 924139 | N/A | N/A | 33245 | 33260 | GACTTAAGCCA | 46 | 2104 |
| | | | | | CCTTT | | |
| 924149 | N/A | N/A | 35066 | 35081 | CTAAGCTTAAC | 80 | 2105 |
| | | | | | CGTGA | | |
| 924159 | N/A | N/A | 3415 | 3430 | ATATATTGGGT | 84 | 2106 |
| | | | | | GCTAC | | |
| 924169 | N/A | N/A | 5280 | 5295 | CTTAAATGCGC | 118 | 2107 |
| | | | | | CTCAA | | |
| 924179 | N/A | N/A | 6225 | 6240 | AAGTAATGCGG | 62 | 2108 |
| | | | | | TCCTC | | |
| 924189 | N/A | N/A | 6546 | 6561 | AAAAGAATGGC | 143 | 2109 |
| | | | | | TCGAG | | |
| 924199 | N/A | N/A | 7146 | 7161 | CACTAGCGGAA | 87 | 2110 |
| | | | | | GGCCC | | |
| 924209 | N/A | N/A | 8576 | 8591 | TACTATAGTAG | 61 | 2111 |
| | | | | | AAGGA | | |
| 924219 | N/A | N/A | 8712 | 8727 | TGGCGAAAAGC | 96 | 2112 |
| | | | | | ACCCG | | |
| 924229 | N/A | N/A | 9566 | 9581 | CCTTAATTTGA | 54 | 2113 |
| | | | | | CCCTC | | |
| 924239 | N/A | N/A | 10236 | 10251 | GACAAGATTAA | 36 | 2114 |
| | | | | | GCACT | | |
| 924249 | N/A | N/A | 11037 | 11052 | TTAGATTAAGC | 54 | 2115 |
| | | | | | CTGAG | | |
| 924259 | N/A | N/A | 11767 | 11782 | CTAGATGTTAG | 51 | 2116 |
| | | | | | ACTGC | | |
| 924269 | N/A | N/A | 12000 | 12015 | GGCCGGAGAGG | 139 | 2117 |
| | | | | | CACTG | | |
| 924279 | N/A | N/A | 13801 | 13816 | CAATGAACGGC | 91 | 2118 |
| | | | | | CTCTG | | |
| 924289 | N/A | N/A | 14555 | 14570 | AAATATACCGA | 70 | 2119 |
| | | | | | TGCAT | | |
| 924299 | N/A | N/A | 15752 | 15767 | GATAAACAAGT | 33 | 2120 |
| | | | | | CTGGG | | |
| 924309 | N/A | N/A | 16539 | 16554 | CTCAATAGAGT | 53 | 2121 |
| | | | | | TGAAG | | |
| 924319 | N/A | N/A | 18332 | 18347 | TGCTTATGCAG | 101 | 2122 |
| | | | | | CTGGG | | |
| 924329 | N/A | N/A | 18967 | 18982 | TAATAGAGTTC | 88 | 2123 |
| | | | | | TCCTC | | |
| 924339 | N/A | N/A | 19431 | 19446 | AGCCACTGAGG | 89 | 2124 |
| | | | | | TACCT | | |
| 924349 | N/A | N/A | 20550 | 20565 | ATAAGAGCTGC | 70 | 2125 |
| | | | | | TGACA | | |
| 924359 | N/A | N/A | 21491 | 21506 | GTCAATTACAA | 35 | 2126 |
| | | | | | ACCTG | | |
| 924369 | N/A | N/A | 22404 | 22419 | TTAAAGGATAG | 87 | 2127 |
| | | | | | TGCAA | | |
| 924379 | N/A | N/A | 22907 | 22922 | ACACAAGGACA | 114 | 2128 |
| | | | | | GCGAG | | |
| 924389 | N/A | N/A | 23938 | 23953 | TCGCATCATTA | 30 | 2129 |
| | | | | | ACAAA | | |
| 924399 | N/A | N/A | 24741 | 24756 | CATCAACAAGT | 79 | 2130 |
| | | | | | TAGAC | | |
| 924409 | N/A | N/A | 25683 | 25698 | TAATAGATACA | 118 | 2131 |
| | | | | | CCTAA | | |
| 924419 | N/A | N/A | 26257 | 26272 | TACAATTGAGC | 77 | 2132 |
| | | | | | TCTTT | | |
| 924429 | N/A | N/A | 26835 | 26850 | AAGCACAACAT | 140 | 2133 |
| | | | | | ATGCT | | |
| 924439 | N/A | N/A | 27503 | 27518 | CACCAGACGGG | 92 | 2134 |
| | | | | | ATGAA | | |
| 924449 | N/A | N/A | 28588 | 28603 | TTCTACTAAAC | 107 | 2135 |
| | | | | | TAATC | | |
| 924459 | N/A | N/A | 29455 | 29470 | TATGAATTTGG | 86 | 2136 |
| | | | | | ACCAC | | |
| 924469 | N/A | N/A | 30002 | 30017 | AACTAAAACGA | 49 | 2137 |
| | | | | | GTGAG | | |
| 924479 | N/A | N/A | 30349 | 30364 | ATAAGAAGTAC | 53 | 2138 |
| | | | | | CTCAC | | |
| 924489 | N/A | N/A | 30794 | 30809 | TCGCAATACCT | 53 | 2139 |
| | | | | | AGGAG | | |
| 924499 | N/A | N/A | 31081 | 31096 | TTAACAACGGA | 72 | 2140 |
| | | | | | GGACA | | |
| 924509 | N/A | N/A | 31231 | 31246 | CACGATAAGGG | 30 | 2141 |
| | | | | | AACCA | | |
| 924519 | N/A | N/A | 32490 | 32505 | GGCTATAGGTT | 78 | 2142 |
| | | | | | CTGAA | | |
| 924529 | N/A | N/A | 34098 | 34113 | CACTAAGGGTC | 94 | 2143 |
| | | | | | AGGAA | | |
| 924539 | N/A | N/A | 34230 | 34245 | CAATATAGTTC | 56 | 2144 |
| | | | | | GATGG | | |
| 924549 | N/A | N/A | 34933 | 34948 | CAATAGATGTA | 117 | 2145 |
| | | | | | CCCTG | | |
| 924559 | N/A | N/A | 35334 | 35349 | TGTTAACAGAG | 67 | 2146 |
| | | | | | TGCTA | | |
| 924569 | N/A | N/A | 36067 | 36082 | GCTCAAACTGA | 110 | 2147 |
| | | | | | TGGCC | | |
| 924579 | N/A | N/A | 36517 | 36532 | CTACAAGTGAG | 96 | 2148 |
| | | | | | TGGTG | | |

TABLE 39
Percent control of human PMP22 RNA with
3-10-3 cEt gapmers

| | SEQ | SEQ | SEQ | SEQ | | | |
|---|---|---|---|---|---|---|---|
| | ID | ID | ID | ID | | | |
| Com- | NO: 1 | NO: 1 | NO: 2 | NO: 2 | | PMP22 | SEQ |
| pound | Start | Stop | Start | Stop | Sequence | (% | ID |
| ID | Site | Site | Site | Site | (5′ to 3′) | UTC) | NO |
| 684394 | 1489 | 1504 | 37852 | 37867 | ATTATTCAGGT | 13 | 31 |
| | | | | | CTCCA | | |
| 886954 | N/A | N/A | 10717 | 10732 | GTCAATCTGTA | 13 | 2149 |
| | | | | | ACATG | | |
| 923821 | N/A | N/A | 3797 | 3812 | CTAAAGTAGCT | 106 | 2150 |
| | | | | | TGTAA | | |
| 923831 | N/A | N/A | 4794 | 4809 | TACTGGATAGC | 37 | 2151 |
| | | | | | ATGGT | | |
| 923841 | N/A | N/A | 7573 | 7588 | CTTAAATAGAG | 95 | 2152 |
| | | | | | ACCTG | | |
| 923851 | N/A | N/A | 7807 | 7822 | ATAAAGCCGAC | 67 | 2153 |
| | | | | | ATGGG | | |
| 923861 | N/A | N/A | 9103 | 9118 | GTGAATCACAA | 61 | 2154 |
| | | | | | TGATG | | |
| 923871 | N/A | N/A | 9709 | 9724 | CGCTATGGCCT | 34 | 2155 |
| | | | | | ACCCA | | |
| 923881 | N/A | N/A | 9845 | 9860 | AGCTGTATTTC | 21 | 2156 |
| | | | | | CGTGG | | |
| 923900 | N/A | N/A | 11253 | 11268 | CGCAATGAGCA | 24 | 2157 |
| | | | | | TAGTT | | |
| 923910 | N/A | N/A | 11866 | 11881 | GCGGAGTCAAA | 20 | 2158 |
| | | | | | GTCAG | | |
| 923920 | N/A | N/A | 12665 | 12680 | TTGTAAATAGG | 55 | 2159 |
| | | | | | TGTAG | | |
| 923930 | N/A | N/A | 14018 | 14033 | CACGAGAGTTG | 70 | 2160 |
| | | | | | TTCAA | | |
| 923940 | N/A | N/A | 14222 | 14237 | CCCGAGATGTT | 49 | 2161 |
| | | | | | CATAT | | |
| 923950 | N/A | N/A | 14942 | 14957 | ATTCAATAGCA | 34 | 2162 |
| | | | | | GGGCA | | |
| 923960 | N/A | N/A | 15917 | 15932 | GTAGAGATTAT | 40 | 2163 |
| | | | | | GGGTT | | |
| 923970 | N/A | N/A | 16116 | 16131 | ACTATAGATTC | 44 | 2164 |
| | | | | | CAGGT | | |
| 923980 | N/A | N/A | 17582 | 17597 | CAACATTGAAT | 56 | 2165 |
| | | | | | ACCCT | | |
| 923990 | N/A | N/A | 18522 | 18537 | GTCAATGATAT | 23 | 2166 |
| | | | | | GCTTG | | |
| 924000 | N/A | N/A | 19159 | 19174 | TTATCAGGAGA | 54 | 2167 |
| | | | | | CTTGT | | |
| 924010 | N/A | N/A | 19253 | 19268 | GAAGGATATCA | 45 | 2168 |
| | | | | | ATCTC | | |
| 924020 | N/A | N/A | 19587 | 19602 | AGCTAACTTTG | 82 | 2169 |
| | | | | | ATACA | | |
| 924030 | N/A | N/A | 19785 | 19800 | TATGATTCATG | 42 | 2170 |
| | | | | | CGGAA | | |
| 924040 | N/A | N/A | 21472 | 21487 | TATTTAGATCA | 95 | 2171 |
| | | | | | AACCT | | |
| 924050 | N/A | N/A | 21610 | 21625 | AAGCAGGTTGG | 31 | 2172 |
| | | | | | ATTCG | | |
| 924060 | N/A | N/A | 23206 | 23221 | TGTCAAATTGA | 44 | 2173 |
| | | | | | TGTCA | | |
| 924070 | N/A | N/A | 23718 | 23733 | TAATATCAGCA | 70 | 2174 |
| | | | | | GAACA | | |
| 924080 | N/A | N/A | 26407 | 26422 | AACTACTACGA | 83 | 2175 |
| | | | | | GACCT | | |
| 924090 | N/A | N/A | 27621 | 27636 | TCTCTATAGGT | 41 | 2176 |
| | | | | | ATGGA | | |
| 924100 | N/A | N/A | 29055 | 29070 | CAACAGTCAAT | 106 | 2177 |
| | | | | | CAAAG | | |
| 924110 | N/A | N/A | 30637 | 30652 | AGCCGAAACAG | 70 | 2178 |
| | | | | | CTCAG | | |
| 924120 | N/A | N/A | 30899 | 30914 | TACATTCGGAA | 59 | 2179 |
| | | | | | TTCTG | | |
| 924130 | N/A | N/A | 31471 | 31486 | GGGCATGCACG | 60 | 2180 |
| | | | | | CTTGT | | |
| 924140 | N/A | N/A | 33251 | 33266 | GTATTTGACTT | 35 | 2181 |
| | | | | | AAGCC | | |
| 924150 | N/A | N/A | 35193 | 35208 | AGGAGATACCA | 87 | 2182 |
| | | | | | GATTC | | |
| 924160 | N/A | N/A | 3416 | 3431 | CATATATTGGG | 32 | 2183 |
| | | | | | TGCTA | | |
| 924170 | N/A | N/A | 5409 | 5424 | TTTAACGGGAA | 156 | 2184 |
| | | | | | CAACG | | |
| 924180 | N/A | N/A | 6228 | 6243 | CCCAAGTAATG | 61 | 2185 |
| | | | | | CGGTC | | |
| 924190 | N/A | N/A | 6547 | 6562 | GAAAAGAATGG | 100 | 2186 |
| | | | | | CTCGA | | |
| 924200 | N/A | N/A | 7149 | 7164 | GCGCACTAGCG | 121 | 2187 |
| | | | | | GAAGG | | |
| 924210 | N/A | N/A | 8579 | 8594 | GTTTACTATAG | 65 | 2188 |
| | | | | | TAGAA | | |
| 924220 | N/A | N/A | 8717 | 8732 | AGGGATGGCGA | 99 | 2189 |
| | | | | | AAAGC | | |
| 924230 | N/A | N/A | 9882 | 9897 | ATATACTGGAT | 103 | 2190 |
| | | | | | CTATG | | |
| 924240 | N/A | N/A | 10237 | 10252 | AGACAAGATTA | 42 | 2191 |
| | | | | | AGCAC | | |
| 924250 | N/A | N/A | 11039 | 11054 | ATTTAGATTAA | 58 | 2192 |
| | | | | | GCCTG | | |
| 924260 | N/A | N/A | 11780 | 11795 | CAAACTACACA | 37 | 2193 |
| | | | | | ACCTA | | |
| 924270 | N/A | N/A | 12103 | 12118 | TCCAAGGGAGT | 66 | 2194 |
| | | | | | GATTC | | |
| 924280 | N/A | N/A | 13804 | 13819 | GACCAATGAAC | 68 | 2195 |
| | | | | | GGCCT | | |
| 924290 | N/A | N/A | 14556 | 14571 | AAAATATACCG | 60 | 2196 |
| | | | | | ATGCA | | |
| 924300 | N/A | N/A | 15753 | 15768 | TGATAAACAAG | 40 | 2197 |
| | | | | | TCTGG | | |
| 924310 | N/A | N/A | 16540 | 16555 | GCTCAATAGAG | 52 | 2198 |
| | | | | | TTGAA | | |
| 924320 | N/A | N/A | 18565 | 18580 | GACTACTAGTT | 68 | 2199 |
| | | | | | TTTCC | | |
| 924330 | N/A | N/A | 19016 | 19031 | CGCTTAGTTTT | 59 | 2200 |
| | | | | | AAGAT | | |
| 924340 | N/A | N/A | 19439 | 19454 | TAACACGCAGC | 78 | 2201 |
| | | | | | CACTG | | |
| 924350 | N/A | N/A | 20552 | 20567 | GTATAAGAGCT | 70 | 2202 |
| | | | | | GCTGA | | |
| 924360 | N/A | N/A | 21492 | 21507 | TGTCAATTACA | 89 | 2203 |
| | | | | | AACCT | | |
| 924370 | N/A | N/A | 22444 | 22459 | GTCATAATGAT | 28 | 2204 |
| | | | | | CAAAC | | |
| 924380 | N/A | N/A | 22909 | 22924 | CTACACAAGGA | 81 | 2205 |
| | | | | | CAGCG | | |
| 924390 | N/A | N/A | 23993 | 24008 | GACAATACATA | 70 | 2206 |
| | | | | | GTGTT | | |
| 924400 | N/A | N/A | 24897 | 24912 | AAAGAGTGAAC | 101 | 2207 |
| | | | | | TACAC | | |
| 924410 | N/A | N/A | 25684 | 25699 | ATAATAGATAC | 67 | 2208 |
| | | | | | ACCTA | | |
| 924420 | N/A | N/A | 26258 | 26273 | TTACAATTGAG | 54 | 2209 |
| | | | | | CTCTT | | |
| 924430 | N/A | N/A | 27039 | 27054 | AAATTAGGTTA | 98 | 2210 |
| | | | | | ACTGT | | |
| 924440 | N/A | N/A | 27591 | 27606 | GACAACCCGTA | 76 | 2211 |
| | | | | | TTTTT | | |
| 924450 | N/A | N/A | 28904 | 28919 | GCATAATGTAA | 55 | 2212 |
| | | | | | TCTAC | | |
| 924460 | N/A | N/A | 29478 | 29493 | TGGTACATATG | 66 | 2213 |
| | | | | | AAGTT | | |
| 924470 | N/A | N/A | 30004 | 30019 | CAAACTAAAAC | 40 | 2214 |
| | | | | | GAGTG | | |
| 924480 | N/A | N/A | 30444 | 30459 | GTAAATCAGTT | 31 | 2215 |
| | | | | | CCAAT | | |
| 924490 | N/A | N/A | 30799 | 30814 | TTAAATCGCAA | 78 | 2216 |
| | | | | | TACCT | | |
| 924500 | N/A | N/A | 31082 | 31097 | ATTAACAACGG | 54 | 2217 |
| | | | | | AGGAC | | |
| 924510 | N/A | N/A | 31232 | 31247 | ACACGATAAGG | 30 | 2218 |
| | | | | | GAACC | | |
| 924520 | N/A | N/A | 32500 | 32515 | AGGAATAGATG | 49 | 2219 |
| | | | | | GCTAT | | |
| 924530 | N/A | N/A | 34116 | 34131 | ATAATAGGCTG | 90 | 2220 |
| | | | | | ATTAG | | |
| 924540 | N/A | N/A | 34231 | 34246 | TCAATATAGTT | 48 | 2221 |
| | | | | | CGATG | | |
| 924550 | N/A | N/A | 34935 | 34950 | AGCAATAGATG | 40 | 2222 |
| | | | | | TACCC | | |
| 924560 | N/A | N/A | 35565 | 35580 | GGTTAATTGTT | 71 | 2223 |
| | | | | | GATTG | | |
| 924570 | N/A | N/A | 36172 | 36187 | TGGATATGCAG | 68 | 2224 |
| | | | | | GTGGG | | |
| 924580 | N/A | N/A | 36532 | 36547 | AATCTATATGC | 79 | 2225 |
| | | | | | CACTC | | |

TABLE 40
Percent control of human PMP22 RNA with
3-10-3 cEt gapmers

| | SEQ | SEQ | SEQ | SEQ | | | |
|---|---|---|---|---|---|---|---|
| | ID | ID | ID | ID | | | |
| Com- | NO: 1 | NO: 1 | NO: 2 | NO: 2 | | PMP22 | SEQ |
| pound | Start | Stop | Start | Stop | Sequence | (% | ID |
| ID | Site | Site | Site | Site | (5′ to 3′) | UTC) | NO |
| 684394 | 1489 | 1504 | 37852 | 37867 | ATTATTCAGGT | 13 | 31 |
| | | | | | CTCCA | | |
| 923822 | N/A | N/A | 3799 | 3814 | CACTAAAGTAG | 42 | 2226 |
| | | | | | CTTGT | | |
| 923832 | N/A | N/A | 4799 | 4814 | CCGACTACTGG | 39 | 2227 |
| | | | | | ATAGC | | |
| 923842 | N/A | N/A | 7574 | 7589 | GCTTAAATAGA | 77 | 2228 |
| | | | | | GACCT | | |
| 923852 | N/A | N/A | 7808 | 7823 | CATAAAGCCGA | 89 | 2229 |
| | | | | | CATGG | | |
| 923862 | N/A | N/A | 9108 | 9123 | GTAGAGTGAAT | 22 | 2230 |
| | | | | | CACAA | | |
| 923872 | N/A | N/A | 9716 | 9731 | CATCAATCGCT | 48 | 2231 |
| | | | | | ATGGC | | |
| 923882 | N/A | N/A | 10027 | 10042 | GTATTACTGGG | 38 | 2232 |
| | | | | | TACTG | | |
| 923891 | N/A | N/A | 10718 | 10733 | TGTCAATCTGT | 57 | 2233 |
| | | | | | AACAT | | |
| 923901 | N/A | N/A | 11261 | 11276 | AAATGGTTCGC | 46 | 2234 |
| | | | | | AATGA | | |
| 923911 | N/A | N/A | 11871 | 11886 | GGCAGGCGGAG | 64 | 2235 |
| | | | | | TCAAA | | |
| 923921 | N/A | N/A | 12771 | 12786 | AAAGTATTCCA | 52 | 2236 |
| | | | | | CACCA | | |
| 923931 | N/A | N/A | 14019 | 14034 | ACACGAGAGTT | 58 | 2237 |
| | | | | | GTTCA | | |
| 923941 | N/A | N/A | 14223 | 14238 | CCCCGAGATGT | 50 | 2238 |
| | | | | | TCATA | | |
| 923951 | N/A | N/A | 15532 | 15547 | TAGTAAGTGGT | 97 | 2239 |
| | | | | | CATCT | | |
| 923961 | N/A | N/A | 16004 | 16019 | CAACACATTCC | 40 | 2240 |
| | | | | | GTCCT | | |
| 923971 | N/A | N/A | 16118 | 16133 | AGACTATAGAT | 17 | 2241 |
| | | | | | TCCAG | | |
| 923981 | N/A | N/A | 17584 | 17599 | CACAACATTGA | 51 | 2242 |
| | | | | | ATACC | | |
| 923991 | N/A | N/A | 18523 | 18538 | AGTCAATGATA | 42 | 2243 |
| | | | | | TGCTT | | |
| 924001 | N/A | N/A | 19163 | 19178 | GGATTTATCAG | 21 | 2244 |
| | | | | | GAGAC | | |
| 924011 | N/A | N/A | 19254 | 19269 | TGAAGGATATC | 72 | 2245 |
| | | | | | AATCT | | |
| 924021 | N/A | N/A | 19595 | 19610 | GGTATTCCAGC | 38 | 2246 |
| | | | | | TAACT | | |
| 924031 | N/A | N/A | 19786 | 19801 | CTATGATTCAT | 24 | 2247 |
| | | | | | GCGGA | | |
| 924041 | N/A | N/A | 21473 | 21488 | CTATTTAGATC | 80 | 2248 |
| | | | | | AAACC | | |
| 924051 | N/A | N/A | 21733 | 21748 | CTTAACAACTA | 101 | 2249 |
| | | | | | CTCAA | | |
| 924061 | N/A | N/A | 23216 | 23231 | GCCAAAGTTGT | 44 | 2250 |
| | | | | | GTCAA | | |
| 924071 | N/A | N/A | 25141 | 25156 | CTCAACATATA | 56 | 2251 |
| | | | | | CCTAA | | |
| 924081 | N/A | N/A | 26409 | 26424 | GAAACTACTAC | 63 | 2252 |
| | | | | | GAGAC | | |
| 924091 | N/A | N/A | 27629 | 27644 | AGGTATGCTCT | 40 | 2253 |
| | | | | | CTATA | | |
| 924101 | N/A | N/A | 29158 | 29173 | ATTAAGGAGAC | 101 | 2254 |
| | | | | | CTCTC | | |
| 924111 | N/A | N/A | 30642 | 30657 | CTTAAAGCCGA | 90 | 2255 |
| | | | | | AACAG | | |
| 924121 | N/A | N/A | 30900 | 30915 | TTACATTCGGA | 70 | 2256 |
| | | | | | ATTCT | | |
| 924131 | N/A | N/A | 31473 | 31488 | CCGGGCATGCA | 98 | 2257 |
| | | | | | CGCTT | | |
| 924141 | N/A | N/A | 34300 | 34315 | CAAGATAAGTG | 57 | 2258 |
| | | | | | AGACA | | |
| 924151 | N/A | N/A | 35199 | 35214 | ACTAAGAGGAG | 81 | 2259 |
| | | | | | ATACC | | |
| 924161 | N/A | N/A | 3894 | 3909 | ACATAATAAGG | 86 | 2260 |
| | | | | | GCCCA | | |
| 924171 | N/A | N/A | 5410 | 5425 | CTTTAACGGGA | 109 | 2261 |
| | | | | | ACAAC | | |
| 924181 | N/A | N/A | 6229 | 6244 | TCCCAAGTAAT | 80 | 2262 |
| | | | | | GCGGT | | |
| 924191 | N/A | N/A | 6566 | 6581 | AGCCAGAGTAG | 101 | 2263 |
| | | | | | TGTGG | | |
| 924201 | N/A | N/A | 7554 | 7569 | AGCTAACCCAG | 70 | 2264 |
| | | | | | CCCAG | | |
| 924211 | N/A | N/A | 8597 | 8612 | ACGATTATGTG | 31 | 2265 |
| | | | | | CAGAG | | |
| 924221 | N/A | N/A | 8784 | 8799 | AATCAGATAGA | 92 | 2266 |
| | | | | | TATCC | | |
| 924231 | N/A | N/A | 9884 | 9899 | ATATATACTGG | 113 | 2267 |
| | | | | | ATCTA | | |
| 924241 | N/A | N/A | 10391 | 10406 | AGAAACCGGAT | 40 | 2268 |
| | | | | | GCTGT | | |
| 924251 | N/A | N/A | 11078 | 11093 | AGATAACCACT | 61 | 2269 |
| | | | | | ACTGG | | |
| 924261 | N/A | N/A | 11931 | 11946 | CACGAGGCAGA | 92 | 2270 |
| | | | | | TAAGG | | |
| 924271 | N/A | N/A | 12340 | 12355 | TCCTAATCCTA | 120 | 2271 |
| | | | | | ACCAG | | |
| 924281 | N/A | N/A | 13959 | 13974 | CCCGAAGTGGG | N.D. | 2272 |
| | | | | | AAGTT | | |
| 924291 | N/A | N/A | 14557 | 14572 | GAAAATATACC | 39 | 2273 |
| | | | | | GATGC | | |
| 924301 | N/A | N/A | 15756 | 15771 | AATTGATAAAC | 76 | 2274 |
| | | | | | AAGTC | | |
| 924311 | N/A | N/A | 16553 | 16568 | GTACATAGGAC | 71 | 2275 |
| | | | | | AGGCT | | |
| 924321 | N/A | N/A | 18568 | 18583 | CCAGACTACTA | 65 | 2276 |
| | | | | | GTTTT | | |
| 924331 | N/A | N/A | 19024 | 19039 | GAATAATTCGC | 62 | 2277 |
| | | | | | TTAGT | | |
| 924341 | N/A | N/A | 19445 | 19460 | AGGGAATAACA | 39 | 2278 |
| | | | | | CGCAG | | |
| 924351 | N/A | N/A | 20553 | 20568 | GGTATAAGAGC | 57 | 2279 |
| | | | | | TGCTG | | |
| 924361 | N/A | N/A | 21557 | 21572 | AAACAAGTCAG | 90 | 2280 |
| | | | | | CTGTA | | |
| 924371 | N/A | N/A | 22642 | 22657 | GTCCAAGGTAA | 84 | 2281 |
| | | | | | GGGTC | | |
| 924381 | N/A | N/A | 22952 | 22967 | ACAACAAGGGA | 60 | 2282 |
| | | | | | TTTTC | | |
| 924391 | N/A | N/A | 24024 | 24039 | ATCATATAAAC | 47 | 2283 |
| | | | | | CAGTG | | |
| 924401 | N/A | N/A | 24995 | 25010 | TATATAGAGAG | 90 | 2284 |
| | | | | | CCACA | | |
| 924411 | N/A | N/A | 25707 | 25722 | AGACATTGTAG | 41 | 2285 |
| | | | | | CTATA | | |
| 924421 | N/A | N/A | 26487 | 26502 | GACAATATCTT | 78 | 2286 |
| | | | | | AGATT | | |
| 924431 | N/A | N/A | 27040 | 27055 | CAAATTAGGTT | 51 | 2287 |
| | | | | | AACTG | | |
| 924441 | N/A | N/A | 27694 | 27709 | ACGGGAATGGC | 30 | 2288 |
| | | | | | TGTTA | | |
| 924451 | N/A | N/A | 28905 | 28920 | GGCATAATGTA | 54 | 2289 |
| | | | | | ATCTA | | |
| 924461 | N/A | N/A | 29641 | 29656 | ATACAACCCTA | 125 | 2290 |
| | | | | | TTTAC | | |
| 924471 | N/A | N/A | 30065 | 30080 | CATATTATCTT | 31 | 2291 |
| | | | | | GAGGG | | |
| 924481 | N/A | N/A | 30477 | 30492 | ATACATGGTGC | 60 | 2292 |
| | | | | | AAATT | | |
| 924491 | N/A | N/A | 30801 | 30816 | ACTTAAATCGC | 76 | 2293 |
| | | | | | AATAC | | |
| 924501 | N/A | N/A | 31083 | 31098 | GATTAACAACG | 55 | 2294 |
| | | | | | GAGGA | | |
| 924511 | N/A | N/A | 31300 | 31315 | TCTAATTACTA | 100 | 2295 |
| | | | | | ACTTC | | |
| 924521 | N/A | N/A | 32505 | 32520 | TGTCAAGGAAT | 76 | 2296 |
| | | | | | AGATG | | |
| 924531 | N/A | N/A | 34117 | 34132 | TATAATAGGCT | 110 | 2297 |
| | | | | | GATTA | | |
| 924541 | N/A | N/A | 34232 | 34247 | TTCAATATAGT | 63 | 2298 |
| | | | | | TCGAT | | |
| 924551 | N/A | N/A | 34936 | 34951 | AAGCAATAGAT | 70 | 2299 |
| | | | | | GTACC | | |
| 924561 | N/A | N/A | 35575 | 35590 | AATCATTGCGG | 90 | 2300 |
| | | | | | GTTAA | | |
| 924571 | N/A | N/A | 36244 | 36259 | GATCAAAGGCA | 106 | 2301 |
| | | | | | AGCTC | | |
| 924581 | N/A | N/A | 36536 | 36551 | TGGAAATCTAT | 83 | 2302 |
| | | | | | ATGCC | | |

TABLE 41
Percent control of human PMP22 RNA with
3-10-3 cEt gapmers

| | SEQ | SEQ | SEQ | SEQ | | | |
|---|---|---|---|---|---|---|---|
| | ID | ID | ID | ID | | | |
| Com- | NO: 1 | NO: 1 | NO: 2 | NO: 2 | | PMP22 | SEQ |
| pound | Start | Stop | Start | Stop | Sequence | (% | ID |
| ID | Site | Site | Site | Site | (5′ to 3′) | UTC) | NO |
| 684394 | 1489 | 1504 | 37852 | 37867 | ATTATTCAGGT | 16 | 31 |
| | | | | | CTCCA | | |
| 923823 | N/A | N/A | 3800 | 3815 | GCACTAAAGTA | 50 | 2303 |
| | | | | | GCTTG | | |
| 923833 | N/A | N/A | 4800 | 4815 | GCCGACTACTG | 93 | 2304 |
| | | | | | GATAG | | |
| 923843 | N/A | N/A | 7575 | 7590 | GGCTTAAATAG | 28 | 2305 |
| | | | | | AGACC | | |
| 923853 | N/A | N/A | 7809 | 7824 | CCATAAAGCCG | 90 | 2306 |
| | | | | | ACATG | | |
| 923863 | N/A | N/A | 9484 | 9499 | GATTAAGGACC | 100 | 2307 |
| | | | | | CCAAG | | |
| 923873 | N/A | N/A | 9717 | 9732 | ACATCAATCGC | 53 | 2308 |
| | | | | | TATGG | | |
| 923883 | N/A | N/A | 10207 | 10222 | TAGGACTGGGA | 63 | 2309 |
| | | | | | CCTTT | | |
| 923892 | N/A | N/A | 10739 | 10754 | CCAACGGCAGA | 55 | 2310 |
| | | | | | AGACA | | |
| 923902 | N/A | N/A | 11262 | 11277 | TAAATGGTTCG | 100 | 2311 |
| | | | | | CAATG | | |
| 923912 | N/A | N/A | 11878 | 11893 | ACGAGAAGGCA | 42 | 2312 |
| | | | | | GGCGG | | |
| 923922 | N/A | N/A | 12816 | 12831 | AAAGAGTATGA | 53 | 2313 |
| | | | | | TTGGG | | |
| 923932 | N/A | N/A | 14020 | 14035 | TACACGAGAGT | 96 | 2314 |
| | | | | | TGTTC | | |
| 923942 | N/A | N/A | 14236 | 14251 | CTGTATGGAAC | 64 | 2315 |
| | | | | | CTCCC | | |
| 923952 | N/A | N/A | 15718 | 15733 | ATGATAGGAGA | 60 | 2316 |
| | | | | | CCACC | | |
| 923962 | N/A | N/A | 16005 | 16020 | ACAACACATTC | 42 | 2317 |
| | | | | | CGTCC | | |
| 923972 | N/A | N/A | 16402 | 16417 | CTCGATGGGAT | 81 | 2318 |
| | | | | | AGGAA | | |
| 923982 | N/A | N/A | 17586 | 17601 | ACCACAACATT | 60 | 2319 |
| | | | | | GAATA | | |
| 923992 | N/A | N/A | 18707 | 18722 | ATGCAATGTGC | 71 | 2320 |
| | | | | | AGGTC | | |
| 924002 | N/A | N/A | 19165 | 19180 | ACGGATTTATC | 10 | 2321 |
| | | | | | AGGAG | | |
| 924012 | N/A | N/A | 19257 | 19272 | CGATGAAGGAT | 78 | 2322 |
| | | | | | ATCAA | | |
| 924022 | N/A | N/A | 19596 | 19611 | AGGTATTCCAG | 35 | 2323 |
| | | | | | CTAAC | | |
| 924032 | N/A | N/A | 19789 | 19804 | TGCCTATGATT | 87 | 2324 |
| | | | | | CATGC | | |
| 924042 | N/A | N/A | 21528 | 21543 | TTCGAGTTCAG | 55 | 2325 |
| | | | | | AGAAA | | |
| 924052 | N/A | N/A | 21735 | 21750 | TTCTTAACAAC | 80 | 2326 |
| | | | | | TACTC | | |
| 924062 | N/A | N/A | 23457 | 23472 | AAGGACATTGA | 58 | 2327 |
| | | | | | TTGTA | | |
| 924072 | N/A | N/A | 25152 | 25167 | AATGATGTAGG | 44 | 2328 |
| | | | | | CTCAA | | |
| 924082 | N/A | N/A | 26410 | 26425 | AGAAACTACTA | 89 | 2329 |
| | | | | | CGAGA | | |
| 924092 | N/A | N/A | 27633 | 27648 | AGAAAGGTATG | 41 | 2330 |
| | | | | | CTCTC | | |
| 924102 | N/A | N/A | 29160 | 29175 | AGATTAAGGAG | 101 | 2331 |
| | | | | | ACCTC | | |
| 924112 | N/A | N/A | 30643 | 30658 | ACTTAAAGCCG | 100 | 2332 |
| | | | | | AAACA | | |
| 924122 | N/A | N/A | 30901 | 30916 | TTTACATTCGG | 86 | 2333 |
| | | | | | AATTC | | |
| 924132 | N/A | N/A | 31566 | 31581 | AGATAATGCAG | 83 | 2334 |
| | | | | | CCCTC | | |
| 924142 | N/A | N/A | 34302 | 34317 | ACCAAGATAAG | 85 | 2335 |
| | | | | | TGAGA | | |
| 924152 | N/A | N/A | 35200 | 35215 | GACTAAGAGGA | 98 | 2336 |
| | | | | | GATAC | | |
| 924162 | N/A | N/A | 4736 | 4751 | ACCGAATAAGC | 41 | 2337 |
| | | | | | TCTAG | | |
| 924172 | N/A | N/A | 5754 | 5769 | CATAAAGGCTC | 74 | 2338 |
| | | | | | TCCTC | | |
| 924182 | N/A | N/A | 6266 | 6281 | CGAGAATTTCA | 113 | 2339 |
| | | | | | GCCGG | | |
| 924192 | N/A | N/A | 6631 | 6646 | GAGGAACGGTC | 97 | 2340 |
| | | | | | CTGGC | | |
| 924202 | N/A | N/A | 7571 | 7586 | TAAATAGAGAC | 85 | 2341 |
| | | | | | CTGCG | | |
| 924212 | N/A | N/A | 8598 | 8613 | AACGATTATGT | 82 | 2342 |
| | | | | | GCAGA | | |
| 924222 | N/A | N/A | 8925 | 8940 | GGACAAGCTCA | 98 | 2343 |
| | | | | | TGGAG | | |
| 924232 | N/A | N/A | 9885 | 9900 | CATATATACTG | 124 | 2344 |
| | | | | | GATCT | | |
| 924242 | N/A | N/A | 10392 | 10407 | GAGAAACCGGA | 57 | 2345 |
| | | | | | TGCTG | | |
| 924252 | N/A | N/A | 11079 | 11094 | GAGATAACCAC | 55 | 2346 |
| | | | | | TACTG | | |
| 924262 | N/A | N/A | 11932 | 11947 | ACACGAGGCAG | 94 | 2347 |
| | | | | | ATAAG | | |
| 924272 | N/A | N/A | 12357 | 12372 | CTCTTATACAC | 30 | 2348 |
| | | | | | AATCA | | |
| 924282 | N/A | N/A | 14136 | 14151 | GTCTTATATAG | 54 | 2349 |
| | | | | | TTCTT | | |
| 924292 | N/A | N/A | 14558 | 14573 | TGAAAATATAC | 92 | 2350 |
| | | | | | CGATG | | |
| 924302 | N/A | N/A | 15798 | 15813 | AGGAAATTGTC | 53 | 2351 |
| | | | | | TGGTG | | |
| 924312 | N/A | N/A | 16815 | 16830 | CTATAACTGGT | 109 | 2352 |
| | | | | | CCTTC | | |
| 924322 | N/A | N/A | 18747 | 18762 | CACAATTACAT | 71 | 2353 |
| | | | | | CCTGA | | |
| 924332 | N/A | N/A | 19025 | 19040 | GGAATAATTCG | 45 | 2354 |
| | | | | | CTTAG | | |
| 924342 | N/A | N/A | 19759 | 19774 | ATGGAGACAAC | 59 | 2355 |
| | | | | | TATGT | | |
| 924352 | N/A | N/A | 20554 | 20569 | CGGTATAAGAG | 75 | 2356 |
| | | | | | CTGCT | | |
| 924362 | N/A | N/A | 21796 | 21811 | TAGCAAACTAT | 123 | 2357 |
| | | | | | CTATA | | |
| 924372 | N/A | N/A | 22698 | 22713 | GCGCAGTAAGA | 114 | 2358 |
| | | | | | GACAG | | |
| 924382 | N/A | N/A | 23007 | 23022 | ACTCAAAGGGC | 113 | 2359 |
| | | | | | TAGTG | | |
| 924392 | N/A | N/A | 24025 | 24040 | CATCATATAAA | 55 | 2360 |
| | | | | | CCAGT | | |
| 924402 | N/A | N/A | 25055 | 25070 | AGATAATTCCT | 91 | 2361 |
| | | | | | CGGAT | | |
| 924412 | N/A | N/A | 26016 | 26031 | CTCATAAGATA | 74 | 2362 |
| | | | | | TGGAA | | |
| 924422 | N/A | N/A | 26488 | 26503 | AGACAATATCT | 122 | 2363 |
| | | | | | TAGAT | | |
| 924432 | N/A | N/A | 27042 | 27057 | TGCAAATTAGG | 88 | 2364 |
| | | | | | TTAAC | | |
| 924442 | N/A | N/A | 27703 | 27718 | GTAAAGATCAC | 73 | 2365 |
| | | | | | GGGAA | | |
| 924452 | N/A | N/A | 28906 | 28921 | AGGCATAATGT | 92 | 2366 |
| | | | | | AATCT | | |
| 924462 | N/A | N/A | 29670 | 29685 | CAACATCTAAC | 107 | 2367 |
| | | | | | CTTGG | | |
| 924472 | N/A | N/A | 30122 | 30137 | CGCTTATGAAA | 54 | 2368 |
| | | | | | CTAAC | | |
| 924482 | N/A | N/A | 30479 | 30494 | TAATACATGGT | 111 | 2369 |
| | | | | | GCAAA | | |
| 924492 | N/A | N/A | 30802 | 30817 | TACTTAAATCG | 128 | 2370 |
| | | | | | CAATA | | |
| 924502 | N/A | N/A | 31084 | 31099 | GGATTAACAAC | 60 | 2371 |
| | | | | | GGAGG | | |
| 924512 | N/A | N/A | 31301 | 31316 | CTCTAATTACT | 119 | 2372 |
| | | | | | AACTT | | |
| 924522 | N/A | N/A | 32515 | 32530 | CAACAGATCTT | 116 | 2373 |
| | | | | | GTCAA | | |
| 924532 | N/A | N/A | 34119 | 34134 | CATATAATAGG | 82 | 2374 |
| | | | | | CTGAT | | |
| 924542 | N/A | N/A | 34233 | 34248 | TTTCAATATAG | 97 | 2375 |
| | | | | | TTCGA | | |
| 924552 | N/A | N/A | 34956 | 34971 | TACAAGATTGT | 82 | 2376 |
| | | | | | CTGCA | | |
| 924562 | N/A | N/A | 35580 | 35595 | AGCGAAATCAT | 84 | 2377 |
| | | | | | TGCGG | | |
| 924572 | N/A | N/A | 36300 | 36315 | GAATAAGGATG | 134 | 2378 |
| | | | | | CAGCC | | |
| 924582 | N/A | N/A | 36616 | 36631 | CACTACATGGC | 161 | 2379 |
| | | | | | CAGCA | | |

TABLE 42
Percent control of human PMP22 RNA with 3-10-3 cEt gapmers

| | SEQ | SEQ | SEQ | SEQ | | | |
|---|---|---|---|---|---|---|---|
| | ID | ID | ID | ID | | | |
| | NO: 1 | NO: 1 | NO: 2 | NO: 2 | | PMP22 | SEQ |
| Compound | Start | Stop | Start | Stop | | (% | ID |
| ID | Site | Site | Site | Site | Sequence (5′ to 3′) | UTC) | NO |
| 684394 | 1489 | 1504 | 37852 | 37867 | ATTATTCAGGTCTCCA | 19 | 31 |
| 923824 | N/A | N/A | 4165 | 4180 | TTACAGTGCCCGTTAT | 88 | 2380 |
| 923834 | N/A | N/A | 5282 | 5297 | GCCTTAAATGCGCCTC | 57 | 2381 |
| 923844 | N/A | N/A | 7598 | 7613 | CTAGATCGGCTCTGAA | 138 | 2382 |
| 923854 | N/A | N/A | 7927 | 7942 | CTTCATCGCCAAGAAA | 77 | 2383 |
| 923864 | N/A | N/A | 9485 | 9500 | GGATTAAGGACCCCAA | 89 | 2384 |
| 923874 | N/A | N/A | 9719 | 9734 | TAACATCAATCGCTAT | 88 | 2385 |
| 923884 | N/A | N/A | 10357 | 10372 | TGCTACGGTCACATTC | 67 | 2386 |
| 923893 | N/A | N/A | 10741 | 10756 | TTCCAACGGCAGAAGA | 81 | 2387 |
| 923903 | N/A | N/A | 11263 | 11278 | TTAAATGGTTCGCAAT | 56 | 2388 |
| 923913 | N/A | N/A | 11879 | 11894 | AACGAGAAGGCAGGCG | 42 | 2389 |
| 923923 | N/A | N/A | 12850 | 12865 | ATGGAACTGCATAGGG | 45 | 2390 |
| 923933 | N/A | N/A | 14021 | 14036 | GTACACGAGAGTTGTT | 108 | 2391 |
| 923943 | N/A | N/A | 14251 | 14266 | CACTTGACGGTCCTTC | 81 | 2392 |
| 923953 | N/A | N/A | 15719 | 15734 | GATGATAGGAGACCAC | 63 | 2393 |
| 923963 | N/A | N/A | 16006 | 16021 | GACAACACATTCCGTC | 90 | 2394 |
| 923973 | N/A | N/A | 16403 | 16418 | GCTCGATGGGATAGGA | 81 | 2395 |
| 923983 | N/A | N/A | 17587 | 17602 | CACCACAACATTGAAT | 116 | 2396 |
| 923993 | N/A | N/A | 19066 | 19081 | TGCAATTGCAGTCATG | 108 | 2397 |
| 924003 | N/A | N/A | 19166 | 19181 | AACGGATTTATCAGGA | 46 | 2398 |
| 924013 | N/A | N/A | 19259 | 19274 | TACGATGAAGGATATC | 59 | 2399 |
| 924023 | N/A | N/A | 19613 | 19628 | AAGGAATCTTCATGTC | 46 | 2400 |
| 924033 | N/A | N/A | 19797 | 19812 | GCTAACTTTGCCTATG | 91 | 2401 |
| 924043 | N/A | N/A | 21533 | 21548 | AATGATTCGAGTTCAG | 40 | 2402 |
| 924053 | N/A | N/A | 21745 | 21760 | TCATACGGTCTTCTTA | 114 | 2403 |
| 924063 | N/A | N/A | 23511 | 23526 | CTTATCTACTATATCC | 66 | 2404 |
| 924073 | N/A | N/A | 25153 | 25168 | AAATGATGTAGGCTCA | 59 | 2405 |
| 924083 | N/A | N/A | 26411 | 26426 | CAGAAACTACTACGAG | 91 | 2406 |
| 924093 | N/A | N/A | 27634 | 27649 | AAGAAAGGTATGCTCT | 54 | 2407 |
| 924103 | N/A | N/A | 29827 | 29842 | TCATAAGACATGTGTA | 68 | 2408 |
| 924113 | N/A | N/A | 30644 | 30659 | AACTTAAAGCCGAAAC | 84 | 2409 |
| 924123 | N/A | N/A | 30902 | 30917 | TTTTACATTCGGAATT | 88 | 2410 |
| 924133 | N/A | N/A | 32454 | 32469 | CCAGACGCAGGATCAG | 51 | 2411 |
| 924143 | N/A | N/A | 34303 | 34318 | TACCAAGATAAGTGAG | 81 | 2412 |
| 924153 | N/A | N/A | 35911 | 35926 | ATCCAGTATGCCGTGT | 47 | 2413 |
| 924163 | N/A | N/A | 4846 | 4861 | ATCTAGCGGGCTCCTC | 113 | 2414 |
| 924173 | N/A | N/A | 5757 | 5772 | GACCATAAAGGCTCTC | 75 | 2415 |
| 924183 | N/A | N/A | 6268 | 6283 | TCCGAGAATTTCAGCC | 58 | 2416 |
| 924193 | N/A | N/A | 6712 | 6727 | GGCGAGGAGGCTGGTT | 155 | 2417 |
| 924203 | N/A | N/A | 7659 | 7674 | AACGAGGCTGCATCAA | 39 | 2418 |
| 924213 | N/A | N/A | 8599 | 8614 | AAACGATTATGTGCAG | 90 | 2419 |
| 924223 | N/A | N/A | 9067 | 9082 | AGCGAGATCACCACCC | 83 | 2420 |
| 924233 | N/A | N/A | 9886 | 9901 | ACATATATACTGGATC | 99 | 2421 |
| 924243 | N/A | N/A | 10437 | 10452 | TCCCATCCGGAGTGCT | 109 | 2422 |
| 924253 | N/A | N/A | 11084 | 11099 | CGGCAGAGATAACCAC | 76 | 2423 |
| 924263 | N/A | N/A | 11934 | 11949 | CCACACGAGGCAGATA | 95 | 2424 |
| 924273 | N/A | N/A | 12693 | 12708 | GCCGAATGACTATATT | 95 | 2425 |
| 924283 | N/A | N/A | 14290 | 14305 | CTCAACTACGCCAAGC | 82 | 2426 |
| 924293 | N/A | N/A | 14559 | 14574 | CTGAAAATATACCGAT | 74 | 2427 |
| 924303 | N/A | N/A | 15799 | 15814 | AAGGAAATTGTCTGGT | 35 | 2428 |
| 924313 | N/A | N/A | 17033 | 17048 | CCAGAATGAGCTTACA | 74 | 2429 |
| 924323 | N/A | N/A | 18748 | 18763 | CCACAATTACATCCTG | 82 | 2430 |
| 924333 | N/A | N/A | 19026 | 19041 | GGGAATAATTCGCTTA | 61 | 2431 |
| 924343 | N/A | N/A | 19930 | 19945 | TCCTAAACAATGTGGC | 105 | 2432 |
| 924353 | N/A | N/A | 21208 | 21223 | AACTAAAGCTCTGGCC | 154 | 2433 |
| 924363 | N/A | N/A | 21801 | 21816 | ACAGATAGCAAACTAT | 100 | 2434 |
| 924373 | N/A | N/A | 22707 | 22722 | TAACAACCAGCGCAGT | 119 | 2435 |
| 924383 | N/A | N/A | 23032 | 23047 | ACTTACTAAGAGTCAG | 78 | 2436 |
| 924393 | N/A | N/A | 24116 | 24131 | AAATATGGTGTTAATC | 92 | 2437 |
| 924403 | N/A | N/A | 25196 | 25211 | ACTATAAGGGCAACAA | 86 | 2438 |
| 924413 | N/A | N/A | 26066 | 26081 | AGATAGTAAGTCTATC | 116 | 2439 |
| 924423 | N/A | N/A | 26772 | 26787 | GCTAATGGGTTGTGAG | 106 | 2440 |
| 924433 | N/A | N/A | 27043 | 27058 | GTGCAAATTAGGTTAA | 62 | 2441 |
| 924443 | N/A | N/A | 27705 | 27720 | AGGTAAAGATCACGGG | 51 | 2442 |
| 924453 | N/A | N/A | 28951 | 28966 | GATAACTACTTTGCTA | 103 | 2443 |
| 924463 | N/A | N/A | 29686 | 29701 | TTCTAGACAAGGTCAC | 36 | 2444 |
| 924473 | N/A | N/A | 30240 | 30255 | AAATAACGAGCCTGTA | 100 | 2445 |
| 924483 | N/A | N/A | 30481 | 30496 | AATAATACATGGTGCA | N.D. | 2446 |
| 924493 | N/A | N/A | 30804 | 30819 | TATACTTAAATCGCAA | 96 | 2447 |
| 924503 | N/A | N/A | 31085 | 31100 | GGGATTAACAACGGAG | 72 | 2448 |
| 924513 | N/A | N/A | 31374 | 31389 | TGTTAAGTTGTCACTT | 79 | 2449 |
| 924523 | N/A | N/A | 33291 | 33306 | ATCCATAATCATCCGT | 39 | 2450 |
| 924533 | N/A | N/A | 34122 | 34137 | TCTCATATAATAGGCT | 109 | 2451 |
| 924543 | N/A | N/A | 34396 | 34411 | GTACATCCTTATCATC | 165 | 2452 |
| 924553 | N/A | N/A | 34959 | 34974 | TATTACAAGATTGTCT | 121 | 2453 |
| 924563 | N/A | N/A | 35623 | 35638 | ACCTACAGGAAGTTCA | 81 | 2454 |
| 924573 | N/A | N/A | 36369 | 36384 | AAGCAAGCAATGCCTA | 102 | 2455 |
| 924583 | N/A | N/A | 36619 | 36634 | CCACACTACATGGCCA | 124 | 2456 |

TABLE 43
Percent control of human PMP22 RNA with 3-10-3 cEt gapmers

| | SEQ | SEQ | SEQ | SEQ | | | |
|---|---|---|---|---|---|---|---|
| | ID | ID | ID | ID | | | |
| | NO: 1 | NO: 1 | NO: 2 | NO: 2 | | PMP22 | SEQ |
| Compound | Start | Stop | Start | Stop | | (% | ID |
| ID | Site | Site | Site | Site | Sequence (5′ to 3′) | UTC) | NO |
| 684394 | 1489 | 1504 | 37852 | 37867 | ATTATTCAGGTCTCCA | 31 | 31 |
| 923825 | N/A | N/A | 4166 | 4181 | TTTACAGTGCCCGTTA | 58 | 2457 |
| 923835 | N/A | N/A | 5828 | 5843 | GCGAGAACTGGGCCGC | 62 | 2458 |
| 923845 | N/A | N/A | 7599 | 7614 | CCTAGATCGGCTCTGA | 41 | 2459 |
| 923855 | N/A | N/A | 7929 | 7944 | ATCTTCATCGCCAAGA | 86 | 2460 |
| 923865 | N/A | N/A | 9486 | 9501 | TGGATTAAGGACCCCA | 42 | 2461 |
| 923875 | N/A | N/A | 9720 | 9735 | TTAACATCAATCGCTA | 102 | 2462 |
| 923885 | N/A | N/A | 10449 | 10464 | GAGTACGGAGACTCCC | 63 | 2463 |
| 923894 | N/A | N/A | 10745 | 10760 | CTATTTCCAACGGCAG | 23 | 2464 |
| 923904 | N/A | N/A | 11264 | 11279 | GTTAAATGGTTCGCAA | 56 | 2465 |
| 923914 | N/A | N/A | 11880 | 11895 | AAACGAGAAGGCAGGC | 142 | 2466 |
| 923924 | N/A | N/A | 12854 | 12869 | ACTTATGGAACTGCAT | 78 | 2467 |
| 923934 | N/A | N/A | 14023 | 14038 | TGGTACACGAGAGTTG | 86 | 2468 |
| 923944 | N/A | N/A | 14254 | 14269 | TTGCACTTGACGGTCC | 124 | 2469 |
| 923954 | N/A | N/A | 15720 | 15735 | CGATGATAGGAGACCA | 71 | 2470 |
| 923964 | N/A | N/A | 16009 | 16024 | GTTGACAACACATTCC | 104 | 2471 |
| 923974 | N/A | N/A | 16440 | 16455 | ATGAACATGTGGTAGG | 89 | 2472 |
| 923984 | N/A | N/A | 17601 | 17616 | GTAACTGTATTCAGCA | 69 | 2473 |
| 923994 | N/A | N/A | 19067 | 19082 | TTGCAATTGCAGTCAT | 83 | 2474 |
| 924004 | N/A | N/A | 19167 | 19182 | AAACGGATTTATCAGG | 150 | 2475 |
| 924014 | N/A | N/A | 19260 | 19275 | GTACGATGAAGGATAT | 61 | 2476 |
| 924024 | N/A | N/A | 19724 | 19739 | AGGCGATGAAGGTGAC | 158 | 2477 |
| 924034 | N/A | N/A | 21345 | 21360 | ACTTATGTTGAGTACC | 110 | 2478 |
| 924044 | N/A | N/A | 21534 | 21549 | TAATGATTCGAGTTCA | 132 | 2479 |
| 924054 | N/A | N/A | 21746 | 21761 | GTCATACGGTCTTCTT | 61 | 2480 |
| 924064 | N/A | N/A | 23512 | 23527 | GCTTATCTACTATATC | 99 | 2481 |
| 924074 | N/A | N/A | 25156 | 25171 | CAGAAATGATGTAGGC | 85 | 2482 |
| 924084 | N/A | N/A | 26413 | 26428 | AGCAGAAACTACTACG | 64 | 2483 |
| 924094 | N/A | N/A | 27635 | 27650 | GAAGAAAGGTATGCTC | 57 | 2484 |
| 924104 | N/A | N/A | 29829 | 29844 | TGTCATAAGACATGTG | 46 | 2485 |
| 924114 | N/A | N/A | 30645 | 30660 | GAACTTAAAGCCGAAA | 94 | 2486 |
| 924124 | N/A | N/A | 30904 | 30919 | GCTTTTACATTCGGAA | 58 | 2487 |
| 924134 | N/A | N/A | 32455 | 32470 | TCCAGACGCAGGATCA | 60 | 2488 |
| 924144 | N/A | N/A | 35042 | 35057 | AAACTTAGATATCTAC | 68 | 2489 |
| 924154 | N/A | N/A | 35915 | 35930 | ATAAATCCAGTATGCC | 142 | 2490 |
| 924164 | N/A | N/A | 4884 | 4899 | TACGAAGCATGCCAGC | 118 | 2491 |
| 924174 | N/A | N/A | 5762 | 5777 | TTATAGACCATAAAGG | 60 | 2492 |
| 924184 | N/A | N/A | 6282 | 6297 | GGTAAAAGGCTGAGTC | 42 | 2493 |
| 924194 | N/A | N/A | 6970 | 6985 | AAACAAGCGGTTCGCA | 31 | 2494 |
| 924204 | N/A | N/A | 7681 | 7696 | ATCATAAATACTCCTC | 94 | 2495 |
| 924214 | N/A | N/A | 8600 | 8615 | GAAACGATTATGTGCA | 67 | 2496 |
| 924224 | N/A | N/A | 9127 | 9142 | ACTAAGGGCATGTCTC | 110 | 2497 |
| 924234 | N/A | N/A | 9888 | 9903 | GAACATATATACTGGA | 43 | 2498 |
| 924244 | N/A | N/A | 10495 | 10510 | CCTTTTCGGGCTGAGT | 69 | 2499 |
| 924254 | N/A | N/A | 11162 | 11177 | ACTCAATCAAAGAGGC | 124 | 2500 |
| 924264 | N/A | N/A | 11972 | 11987 | TAACGAATATCCCCAC | 135 | 2501 |
| 924274 | N/A | N/A | 12699 | 12714 | CCCAAGGCCGAATGAC | 46 | 2502 |
| 924284 | N/A | N/A | 14456 | 14471 | GAGAAACCCGTGGAAG | 73 | 2503 |
| 924294 | N/A | N/A | 14560 | 14575 | ACTGAAAATATACCGA | 46 | 2504 |
| 924304 | N/A | N/A | 15853 | 15868 | ATGCAGAAGGTCTCCC | 109 | 2505 |
| 924314 | N/A | N/A | 17304 | 17319 | AGCAAACCCTGTCATG | 83 | 2506 |
| 924324 | N/A | N/A | 18866 | 18881 | AGTAAACCAATGCCCG | 103 | 2507 |
| 924334 | N/A | N/A | 19404 | 19419 | ATAATAGTAAGCTGTC | 95 | 2508 |
| 924344 | N/A | N/A | 20005 | 20020 | ACACAGATCGCCATTT | 40 | 2509 |
| 924354 | N/A | N/A | 21244 | 21259 | CAATATCCAACCTTGG | 22 | 2510 |
| 924364 | N/A | N/A | 21911 | 21926 | TTATTAGCACATTGGC | 29 | 2511 |
| 924374 | N/A | N/A | 22708 | 22723 | GTAACAACCAGCGCAG | 65 | 2512 |
| 924384 | N/A | N/A | 23163 | 23178 | AACGAAGAAGAGTTTG | 55 | 2513 |
| 924394 | N/A | N/A | 24323 | 24338 | TATCATAGAACTATGA | 46 | 2514 |
| 924404 | N/A | N/A | 25197 | 25212 | GACTATAAGGGCAACA | 43 | 2515 |
| 924414 | N/A | N/A | 26068 | 26083 | TAAGATAGTAAGTCTA | 85 | 2516 |
| 924424 | N/A | N/A | 26773 | 26788 | GGCTAATGGGTTGTGA | 75 | 2517 |
| 924434 | N/A | N/A | 27050 | 27065 | TTTAAGGGTGCAAATT | 67 | 2518 |
| 924444 | N/A | N/A | 27780 | 27795 | GGCTTATCAGAACTTC | 37 | 2519 |
| 924454 | N/A | N/A | 29306 | 29321 | TAAGATGTAAGCATGT | 59 | 2520 |
| 924464 | N/A | N/A | 29774 | 29789 | CATGAGTATTGAAATG | 72 | 2521 |
| 924474 | N/A | N/A | 30241 | 30256 | AAAATAACGAGCCTGT | 91 | 2522 |
| 924484 | N/A | N/A | 30525 | 30540 | TTATAGTACAGGCTTG | 42 | 2523 |
| 924494 | N/A | N/A | 30805 | 30820 | ATATACTTAAATCGCA | 54 | 2524 |
| 924504 | N/A | N/A | 31140 | 31155 | CAACATCCTAGAGATC | 101 | 2525 |
| 924514 | N/A | N/A | 31611 | 31626 | ATCCATAAAGATCACA | 94 | 2526 |
| 924524 | N/A | N/A | 33332 | 33347 | ACCCATAGCATTGACT | 83 | 2527 |
| 924534 | N/A | N/A | 34134 | 34149 | AGCCACACGGACTCTC | 128 | 2528 |
| 924544 | N/A | N/A | 34706 | 34721 | TGGCAATGACCGGGAC | 63 | 2529 |
| 924554 | N/A | N/A | 35096 | 35111 | ATCTTAGTAGAATCTC | 70 | 2530 |
| 924564 | N/A | N/A | 35668 | 35683 | CACAATAGTCTTGGAA | 48 | 2531 |
| 924574 | N/A | N/A | 36378 | 36393 | TACCAGGTGAAGCAAG | 58 | 2532 |
| 924584 | N/A | N/A | 36762 | 36777 | AAGGAGGTAGCACAAA | 110 | 2533 |

TABLE 44
Percent control of human PMP22 RNA with 3-10-3 cEt gapmers

| | SEQ | SEQ | SEQ | SEQ | | | |
|---|---|---|---|---|---|---|---|
| | ID | ID | ID | ID | | | |
| | NO: 1 | NO: 1 | NO: 2 | NO: 2 | | PMP22 | SEQ |
| Compound | Start | Stop | Start | Stop | | (% | ID |
| ID | Site | Site | Site | Site | Sequence (5′ to 3′) | UTC) | NO |
| 684394 | 1489 | 1504 | 37852 | 37867 | ATTATTCAGGTCTCCA | 71 | 31 |
| 923826 | N/A | N/A | 4167 | 4182 | ATTTACAGTGCCCGTT | 72 | 2534 |
| 923836 | N/A | N/A | 5829 | 5844 | GGCGAGAACTGGGCCG | 15 | 2535 |
| 923846 | N/A | N/A | 7619 | 7634 | GTCAAATGAAGGTCGG | 24 | 2536 |
| 923856 | N/A | N/A | 8996 | 9011 | CGACATTCTGGCTTGT | 63 | 2537 |
| 923866 | N/A | N/A | 9498 | 9513 | AATACGATCTTCTGGA | 130 | 2538 |
| 923876 | N/A | N/A | 9721 | 9736 | CTTAACATCAATCGCT | 100 | 2539 |
| 923886 | N/A | N/A | 10450 | 10465 | CGAGTACGGAGACTCC | 52 | 2540 |
| 923895 | N/A | N/A | 10747 | 10762 | AGCTATTTCCAACGGC | 92 | 2541 |
| 923905 | N/A | N/A | 11266 | 11281 | AAGTTAAATGGTTCGC | 65 | 2542 |
| 923915 | N/A | N/A | 11885 | 11900 | TAGAAAAACGAGAAGG | N.D. | 2543 |
| 923925 | N/A | N/A | 12855 | 12870 | GACTTATGGAACTGCA | 85 | 2544 |
| 923935 | N/A | N/A | 14024 | 14039 | CTGGTACACGAGAGTT | 70 | 2545 |
| 923945 | N/A | N/A | 14261 | 14276 | AGCGATCTTGCACTTG | 98 | 2546 |
| 923955 | N/A | N/A | 15722 | 15737 | AGCGATGATAGGAGAC | 44 | 2547 |
| 923965 | N/A | N/A | 16040 | 16055 | AGAGAAACCCTAAGGG | 74 | 2548 |
| 923975 | N/A | N/A | 16679 | 16694 | CACTACCCATAGTGAT | 68 | 2549 |
| 923985 | N/A | N/A | 17605 | 17620 | CCAAGTAACTGTATTC | 86 | 2550 |
| 923995 | N/A | N/A | 19083 | 19098 | ATGACGGGAAAGGCAG | 113 | 2551 |
| 924005 | N/A | N/A | 19169 | 19184 | TCAAACGGATTTATCA | 43 | 2552 |
| 924015 | N/A | N/A | 19261 | 19276 | TGTACGATGAAGGATA | 31 | 2553 |
| 924025 | N/A | N/A | 19728 | 19743 | ACAAAGGCGATGAAGG | 28 | 2554 |
| 924035 | N/A | N/A | 21346 | 21361 | AACTTATGTTGAGTAC | 55 | 2555 |
| 924045 | N/A | N/A | 21535 | 21550 | ATAATGATTCGAGTTC | 56 | 2556 |
| 924055 | N/A | N/A | 21748 | 21763 | AGGTCATACGGTCTTC | 14 | 2557 |
| 924065 | N/A | N/A | 23513 | 23528 | TGCTTATCTACTATAT | 74 | 2558 |
| 924075 | N/A | N/A | 26401 | 26416 | TACGAGACCTCACATA | 42 | 2559 |
| 924085 | N/A | N/A | 27616 | 27631 | ATAGGTATGGAAATCA | 22 | 2560 |
| 924095 | N/A | N/A | 28832 | 28847 | GATTATGTGTCCAGAT | 79 | 2561 |
| 924105 | N/A | N/A | 30163 | 30178 | AGCGAGGCACATCTCA | 31 | 2562 |
| 924115 | N/A | N/A | 30646 | 30661 | AGAACTTAAAGCCGAA | 53 | 2563 |
| 924125 | N/A | N/A | 30912 | 30927 | AGTCATGCGCTTTTAC | 68 | 2564 |
| 924135 | N/A | N/A | 32462 | 32477 | TCCAAAGTCCAGACGC | 39 | 2565 |
| 924145 | N/A | N/A | 35052 | 35067 | GATAAGCAGTAAACTT | 40 | 2566 |
| 924155 | N/A | N/A | 3017 | 3032 | GTATATATCCACCTTT | 67 | 2567 |
| 924165 | N/A | N/A | 4885 | 4900 | CTACGAAGCATGCCAG | 77 | 2568 |
| 924175 | N/A | N/A | 5764 | 5779 | TCTTATAGACCATAAA | 33 | 2569 |
| 924185 | N/A | N/A | 6325 | 6340 | CCGAAGGGAGTAGATG | 80 | 2570 |
| 924195 | N/A | N/A | 6975 | 6990 | AAACAAAACAAGCGGT | 47 | 2571 |
| 924205 | N/A | N/A | 7741 | 7756 | TCCTAAAAGGGTGTTT | 39 | 2572 |
| 924215 | N/A | N/A | 8602 | 8617 | CAGAAACGATTATGTG | 52 | 2573 |
| 924225 | N/A | N/A | 9179 | 9194 | GTCGATATTTTTTTCA | 42 | 2574 |
| 924235 | N/A | N/A | 9933 | 9948 | CTGAACTGGATCTAAA | 61 | 2575 |
| 924245 | N/A | N/A | 10667 | 10682 | GTTTAAGCACAACTTA | 82 | 2576 |
| 924255 | N/A | N/A | 11167 | 11182 | GTTAAACTCAATCAAA | 90 | 2577 |
| 924265 | N/A | N/A | 11975 | 11990 | TCATAACGAATATCCC | 93 | 2578 |
| 924275 | N/A | N/A | 13644 | 13659 | AAACGAGGAAGCAGCG | 81 | 2579 |
| 924285 | N/A | N/A | 14506 | 14521 | TTATAGAGGCTTCTGG | 127 | 2580 |
| 924295 | N/A | N/A | 14884 | 14899 | ACCCATAGGGTCTTGG | 46 | 2581 |
| 924305 | N/A | N/A | 15892 | 15907 | AGCCACGAAGATTTTA | 41 | 2582 |
| 924315 | N/A | N/A | 17562 | 17577 | TATAGAGGAATGACTC | 64 | 2583 |
| 924325 | N/A | N/A | 18867 | 18882 | CAGTAAACCAATGCCC | 111 | 2584 |
| 924335 | N/A | N/A | 19405 | 19420 | GATAATAGTAAGCTGT | 31 | 2585 |
| 924345 | N/A | N/A | 20264 | 20279 | CCATATCAAGTCCCAC | 32 | 2586 |
| 924355 | N/A | N/A | 21432 | 21447 | GCTAAACTATAGATTA | 25 | 2587 |
| 924365 | N/A | N/A | 22289 | 22304 | CACCAAGCAGTATGAA | 44 | 2588 |
| 924375 | N/A | N/A | 22716 | 22731 | ATAGACAGGTAACAAC | 56 | 2589 |
| 924385 | N/A | N/A | 23164 | 23179 | CAACGAAGAAGAGTTT | 94 | 2590 |
| 924395 | N/A | N/A | 24436 | 24451 | CAAGATACCACCTACC | 44 | 2591 |
| 924405 | N/A | N/A | 25221 | 25236 | ACACATGGGACAGCTT | 44 | 2592 |
| 924415 | N/A | N/A | 26072 | 26087 | GCATTAAGATAGTAAG | 34 | 2593 |
| 924425 | N/A | N/A | 26782 | 26797 | GAAAATGACGGCTAAT | 52 | 2594 |
| 924435 | N/A | N/A | 27103 | 27118 | AGTAACTGAGTAAGAT | 53 | 2595 |
| 924445 | N/A | N/A | 27843 | 27858 | GTTAAAGAGGGCCTGA | 52 | 2596 |
| 924455 | N/A | N/A | 29307 | 29322 | GTAAGATGTAAGCATG | 80 | 2597 |
| 924465 | N/A | N/A | 29856 | 29871 | CAGCAACCATCCAGGA | 56 | 2598 |
| 924475 | N/A | N/A | 30242 | 30257 | TAAAATAACGAGCCTG | 69 | 2599 |
| 924485 | N/A | N/A | 30527 | 30542 | TCTTATAGTACAGGCT | 106 | 2600 |
| 924495 | N/A | N/A | 30822 | 30837 | CAAGAGTGGATTAGTA | 45 | 2601 |
| 924505 | N/A | N/A | 31168 | 31183 | TGGAAAGATCCTGCAG | 81 | 2602 |
| 924515 | N/A | N/A | 31814 | 31829 | ACCTAATGCAATCAAG | 38 | 2603 |
| 924525 | N/A | N/A | 33675 | 33690 | GAGCAGAGTGATCCAA | 78 | 2604 |
| 924535 | N/A | N/A | 34180 | 34195 | CCCAAGAGCATAGACG | 70 | 2605 |
| 924545 | N/A | N/A | 34819 | 34834 | TAGTAAGTGGACTGTG | 88 | 2606 |
| 924555 | N/A | N/A | 35117 | 35132 | AGCTTAATGTGTATGA | 72 | 2607 |
| 924565 | N/A | N/A | 35669 | 35684 | ACACAATAGTCTTGGA | 28 | 2608 |
| 924575 | N/A | N/A | 36383 | 36398 | CCACATACCAGGTGAA | 36 | 2609 |
| 924585 | N/A | N/A | 36830 | 36845 | TGACAATTGCTGGGTA | 54 | 2610 |

### Example 6: Effect Modified Oligonucleotides on Human PMP22 RNA In Vitro, Single Dose

[0376] Modified oligonucleotides in the tables below are 3-10-3 cEt gapmers. The modified oligonucleotides are 16 nucleosides in length, wherein the central gap segment consists of ten nucleosides comprising a 2′-β-D-deoxyribosyl sugar moiety and is flanked by wing segments at the 5′ end and the 3′ end having three nucleosides each. Each nucleoside of the 5′ wing segment and each nucleoside in the 3′ wing segment is a cEt nucleoside. All internucleoside linkages throughout the modified oligonucleotide are phosphorothioate (P═S) linkages. All cytosine residues throughout the modified oligonucleotide are 5-methylcytosines.

[0377] “Start site” indicates the 5′-most nucleoside to which the modified oligonucleotide is targeted in the human gene sequence. “Stop site” indicates the 3′-most nucleoside to which the modified oligonucleotide is targeted human gene sequence. Each modified oligonucleotide listed in the Tables below is targeted to either SEQ ID NO: 1 (GENBANK Accession No. NM_000304.3), SEQ ID NO: 2 (GENBANK Accession No. NC_000017.11 truncated from nucleotides 15227001 to 15268000), or SEQ ID NO: 3 (GENBANK Accession No. NM_153321.2). ‘N/A’ indicates that the modified oligonucleotide does not target that particular gene sequence with 100% complementarity.

[0378] Cultured A-431 cells at a density of 10,000 cells per well were treated using free uptake with 2,000 nM of modified oligonucleotide. After a treatment period of approximately 48 hours, total RNA was isolated from the cells and PMP22 RNA levels were measured by quantitative real-time RTPCR. Human PMP22 primer probe set RTS4579, described herein above, was used to measure RNA levels. PMP22 RNA levels were adjusted according to total RNA content, as measured by RIBOGREEN®. Results are presented in the tables below as percent PMP22 RNA levels relative to untreated control cells. The modified oligonucleotides with percent control values marked with an asterisk (*) are complementary to the amplicon region of the primer probe set. Additional assays may be used to measure the potency and efficacy of the modified oligonucleotides targeting the amplicon region.

TABLE 45
Percent control of human PMP22 RNA with 3-10-3 cEt gapmers

| | SEQ | SEQ | SEQ | SEQ | | | |
|---|---|---|---|---|---|---|---|
| | ID | ID | ID | ID | | | |
| | NO: 1 | NO: 1 | NO: 2 | NO: 2 | | PMP22 | SEQ |
| Compound | Start | Stop | Start | Stop | | (% | ID |
| ID | Site | Site | Site | Site | Sequence (5′ to 3′) | UTC) | NO |
| 684267 | 864 | 879 | 37227 | 37242 | ATCTTCAATCAACAGC | 20 | 30 |
| 684394 | 1489 | 1504 | 37852 | 37867 | ATTATTCAGGTCTCCA | 10 | 31 |
| 684394 | 1489 | 1504 | 37852 | 37867 | ATTATTCAGGTCTCCA | 13 | 31 |
| 1079082 | N/A | N/A | 28710 | 28725 | CTAAGTCCCAAGTTCT | 55 | 2612 |
| 1205211 | N/A | N/A | 24433 | 24448 | GATACCACCTACCAGA | 100 | 2613 |
| 1205224 | N/A | N/A | 26617 | 26632 | CTTTGGTAGATGCAGC | 18 | 2614 |
| 1209866 | N/A | N/A | 3675 | 3690 | AGTCTAAAGACATGGC | 168 | 2615 |
| 1209894 | N/A | N/A | 7752 | 7767 | CCAATTTCAAGTCCTA | 13 | 2616 |
| 1209922 | N/A | N/A | 9848 | 9863 | TAAAGCTGTATTTCCG | 3 | 2617 |
| 1209950 | N/A | N/A | 11976 | 11991 | ATCATAACGAATATCC | 22 | 2618 |
| 1209978 | N/A | N/A | 15613 | 15628 | TATTGATAGTCATGAG | 15 | 2619 |
| 1210006 | N/A | N/A | 16707 | 16722 | CCCTATTTGTTTCCTG | 59 | 2620 |
| 1210034 | N/A | N/A | 19525 | 19540 | ACAGAGCTAGTTTGTC | 77 | 2621 |
| 1210062 | N/A | N/A | 21799 | 21814 | AGATAGCAAACTATCT | 75 | 2622 |
| 1210091 | N/A | N/A | 23529 | 23544 | ACTATATGTGTTCAAG | 42 | 2623 |
| 1210119 | N/A | N/A | 24941 | 24956 | GGACAATGTATACACT | 15 | 2624 |
| 1210147 | N/A | N/A | 26278 | 26293 | GAATTTTAGTCCCAAC | 85 | 2625 |
| 1210175 | N/A | N/A | 27615 | 27630 | TAGGTATGGAAATCAA | 25 | 2626 |
| 1210203 | N/A | N/A | 29589 | 29604 | GTGAAATGGTACCATG | 48 | 2627 |
| 1210232 | N/A | N/A | 30063 | 30078 | TATTATCTTGAGGGCA | 45 | 2628 |
| 1210260 | N/A | N/A | 31248 | 31263 | TTGACTTAGAACTGTC | 104 | 2629 |
| 1210288 | N/A | N/A | 33198 | 33213 | TTATTAATCCCCCCCC | 100 | 2630 |
| 1210316 | N/A | N/A | 35305 | 35320 | ACACTTATCATCATGC | 44 | 2631 |
| 1210346 | 1515 | 1530 | 37878 | 37893 | GTTATAAACCATTTAT | 61 | 2632 |
| 1210374 | N/A | N/A | 3508 | 3523 | TATGAGCATATCTAAC | 126 | 2633 |
| 1210402 | N/A | N/A | 4485 | 4500 | AGCCTTGAGGCACGGG | 158 | 2634 |
| 1210430 | N/A | N/A | 4789 | 4804 | GATAGCATGGTCTGGG | 192 | 2635 |
| 1210458 | N/A | N/A | 5099 | 5114 | CAGCGGATGCCCAGGG | 170 | 2636 |
| 1210486 | N/A | N/A | 5383 | 5398 | GTCGCTGCAGTAGGGT | 71 | 2637 |
| 1210514 | N/A | N/A | 5830 | 5845 | AGGCGAGAACTGGGCC | 109 | 2638 |
| 1210542 | N/A | N/A | 6269 | 6284 | GTCCGAGAATTTCAGC | 139 | 2639 |
| 1210570 | N/A | N/A | 6525 | 6540 | TGCCCGGACCCTGCGC | 89 | 2640 |
| 1210598 | N/A | N/A | 6870 | 6885 | CCCGGCGACCTCCCTG | 190 | 2641 |
| 1210626 | N/A | N/A | 7480 | 7495 | GGCAGATTGCCAGAAA | 167 | 2642 |
| 1210654 | N/A | N/A | 8421 | 8436 | AATGGAGATACTGTGA | 53 | 2643 |
| 1210682 | N/A | N/A | 8806 | 8821 | CCCACGATCCATTGCT | 128 | 2644 |
| 1210710 | N/A | N/A | 9189 | 9204 | CAGCTCCCAGGTCGAT | 65 | 2645 |
| 1210738 | N/A | N/A | 9476 | 9491 | ACCCCAAGGCTTAGCT | 115 | 2646 |
| 1210758 | N/A | N/A | 9790 | 9805 | TCTAGGTCCTTCCAGC | 89 | 2647 |
| 1210784 | N/A | N/A | 10358 | 10373 | GTGCTACGGTCACATT | 106 | 2648 |
| 1210812 | N/A | N/A | 10612 | 10627 | GGGTTTTAACACGCCT | 142 | 2649 |
| 1210840 | N/A | N/A | 11140 | 11155 | GGATTCGCCACTTAAG | 75 | 2650 |
| 1210868 | N/A | N/A | 11764 | 11779 | GATGTTAGACTGCCTC | 35 | 2651 |
| 1210896 | N/A | N/A | 12180 | 12195 | AGATTTCCCATCCGCT | 45 | 2652 |
| 1210924 | N/A | N/A | 12668 | 12683 | CTCTTGTAAATAGGTG | 17 | 2653 |
| 1210952 | N/A | N/A | 13528 | 13543 | ACTCTAGATGTTTGGC | 30 | 2654 |
| 1210980 | N/A | N/A | 13969 | 13984 | TGGAGAGACTCCCGAA | 116 | 2655 |
| 1211008 | N/A | N/A | 14450 | 14465 | CCCGTGGAAGACAGCA | 129 | 2656 |
| 1211036 | N/A | N/A | 14991 | 15006 | GGACTTGATATTTGGA | 9 | 2657 |
| 1211064 | N/A | N/A | 15647 | 15662 | AACCCAAAGCATTGAT | 29 | 2658 |
| 1211092 | N/A | N/A | 16368 | 16383 | ACTCCGGGTCCCTGCC | 65 | 2659 |
| 1211118 | N/A | N/A | 16931 | 16946 | CACCAGCGATCCTGCT | 125 | 2660 |
| 1211145 | N/A | N/A | 17657 | 17672 | ACTTAGCTCTGAACCC | 89 | 2661 |
| 1211173 | N/A | N/A | 18647 | 18662 | GGAAACCAGGGTACCT | 119 | 2662 |
| 1211201 | N/A | N/A | 19028 | 19043 | CAGGGAATAATTCGCT | 34 | 2663 |
| 1211225 | N/A | N/A | 19238 | 19253 | CCCTCCTTGGTAATTC | 81 | 2664 |
| 1211252 | N/A | N/A | 19800 | 19815 | CAGGCTAACTTTGCCT | 147 | 2665 |
| 1211280 | N/A | N/A | 20393 | 20408 | AGCCCCCTCAGCTATA | 143 | 2666 |
| 1211308 | N/A | N/A | 21599 | 21614 | ATTCGACATGCAAGCT | 93 | 2667 |
| 1211335 | N/A | N/A | 22533 | 22548 | TCTGACCGCCCACCTA | 92 | 2668 |
| 1211362 | N/A | N/A | 23042 | 23057 | CACTCTATTGACTTAC | 44 | 2669 |
| 1211410 | N/A | N/A | 25704 | 25719 | CATTGTAGCTATATTC | 36 | 2670 |
| 1211458 | N/A | N/A | 27347 | 27362 | ACAACCTGAGTTCCAC | 89 | 2671 |
| 1211486 | N/A | N/A | 27926 | 27941 | ACTAGGAGTTAAAGTC | 89 | 2672 |
| 1211520 | N/A | N/A | 28854 | 28869 | GATAGCCTCAGTATTC | 77 | 2673 |
| 1211548 | N/A | N/A | 29494 | 29509 | GTACCTAGACATACTC | 157 | 2674 |
| 1211576 | N/A | N/A | 30129 | 30144 | CAATCATCGCTTATGA | 43 | 2675 |
| 1211603 | N/A | N/A | 30792 | 30807 | GCAATACCTAGGAGAA | 10 | 2676 |
| 1211631 | N/A | N/A | 31246 | 31261 | GACTTAGAACTGTCAC | 127 | 2677 |
| 1211656 | N/A | N/A | 31661 | 31676 | CAAGAGCCCTAGCACC | 83 | 2678 |
| 1211684 | N/A | N/A | 32452 | 32467 | AGACGCAGGATCAGGA | 17 | 2679 |
| 1211712 | N/A | N/A | 33339 | 33354 | GAAAGCCACCCATAGC | 39 | 2680 |
| 1211740 | N/A | N/A | 33843 | 33858 | ATGCTACCCAAATGCA | 152 | 2681 |
| 1211768 | N/A | N/A | 34276 | 34291 | ACCTTAAGGACTGTGT | 105 | 2682 |
| 1211796 | N/A | N/A | 34637 | 34652 | ACTGACCCTGTCCAGA | 79 | 2683 |
| 1211824 | N/A | N/A | 34955 | 34970 | ACAAGATTGTCTGCAT | 29 | 2684 |
| 1211852 | N/A | N/A | 35301 | 35316 | TTATCATCATGCAGGC | 72 | 2685 |
| 1211880 | N/A | N/A | 35698 | 35713 | CCACTTGACTGGCCCC | 119 | 2686 |
| 1211908 | N/A | N/A | 36128 | 36143 | CAGCCCTTCGGTGTTG | 162 | 2687 |
| 1211936 | N/A | N/A | 36519 | 36534 | CTCTACAAGTGAGTGG | 101 | 2688 |

TABLE 46
Percent control of human PMP22 RNA with 3-10-3 cEt gapmers

| | SEQ | SEQ | SEQ | SEQ | | | |
|---|---|---|---|---|---|---|---|
| | ID | ID | ID | ID | | | |
| | NO: 1 | NO: 1 | NO: 2 | NO: 2 | | PMP22 | SEQ |
| Compound | Start | Stop | Start | Stop | | (% | ID |
| ID | Site | Site | Site | Site | Sequence (5′ to 3′) | UTC) | NO |
| 684267 | 864 | 879 | 37227 | 37242 | ATCTTCAATCAACAGC | 13 | 30 |
| 684394 | 1489 | 1504 | 37852 | 37867 | ATTATTCAGGTCTCCA | 9 | 31 |
| 684394 | 1489 | 1504 | 37852 | 37867 | ATTATTCAGGTCTCCA | 12 | 31 |
| 1079083 | N/A | N/A | 28711 | 28726 | TCTAAGTCCCAAGTTC | 68 | 2689 |
| 1205213 | N/A | N/A | 24437 | 24452 | TCAAGATACCACCTAC | 72 | 2690 |
| 1209867 | N/A | N/A | 3897 | 3912 | GCAACATAATAAGGGC | 102 | 2691 |
| 1209895 | N/A | N/A | 7837 | 7852 | GCTTTACTAACAATGT | 61 | 2692 |
| 1209923 | N/A | N/A | 9873 | 9888 | ATCTATGAGTAGCTCC | 13 | 2693 |
| 1209951 | N/A | N/A | 11984 | 11999 | GATACAATATCATAAC | 87 | 2694 |
| 1209979 | N/A | N/A | 15614 | 15629 | CTATTGATAGTCATGA | 91 | 2695 |
| 1210007 | N/A | N/A | 16709 | 16724 | CACCCTATTTGTTTCC | 48 | 2696 |
| 1210035 | N/A | N/A | 19569 | 19584 | TATTCAATGAACTGCA | 42 | 2697 |
| 1210063 | N/A | N/A | 21813 | 21828 | GCAAATATCTGCACAG | 71 | 2698 |
| 1210092 | N/A | N/A | 23535 | 23550 | AATGACACTATATGTG | 62 | 2699 |
| 1210120 | N/A | N/A | 24962 | 24977 | GTAACCAAAGCAGTTC | 67 | 2700 |
| 1210148 | N/A | N/A | 26414 | 26429 | CAGCAGAAACTACTAC | 79 | 2701 |
| 1210176 | N/A | N/A | 27706 | 27721 | GAGGTAAAGATCACGG | 54 | 2702 |
| 1210204 | N/A | N/A | 29668 | 29683 | ACATCTAACCTTGGGC | 47 | 2703 |
| 1210233 | N/A | N/A | 30066 | 30081 | CCATATTATCTTGAGG | 24 | 2704 |
| 1210261 | N/A | N/A | 31249 | 31264 | ATTGACTTAGAACTGT | 33 | 2705 |
| 1210289 | N/A | N/A | 33199 | 33214 | TTTATTAATCCCCCCC | 78 | 2706 |
| 1210317 | N/A | N/A | 35333 | 35348 | GTTAACAGAGTGCTAG | 127 | 2707 |
| 1210347 | N/A | N/A | 2835 | 2850 | CACCCGGCCAAACAGC | 139 | 2708 |
| 1210375 | N/A | N/A | 3544 | 3559 | CATACTCAGGACTGTT | 126 | 2709 |
| 1210403 | N/A | N/A | 4496 | 4511 | GTGCGCAGGCCAGCCT | 120 | 2710 |
| 1210431 | N/A | N/A | 4793 | 4808 | ACTGGATAGCATGGTC | 159 | 2711 |
| 1210459 | N/A | N/A | 5108 | 5123 | AATGTAGCTCAGCGGA | 117 | 2712 |
| 1210487 | N/A | N/A | 5563 | 5578 | ACTTACAGCCCAAAGG | 106 | 2713 |
| 1210515 | N/A | N/A | 5832 | 5847 | CAAGGCGAGAACTGGG | 133 | 2714 |
| 1210543 | N/A | N/A | 6271 | 6286 | GAGTCCGAGAATTTCA | 71 | 2715 |
| 1210571 | N/A | N/A | 6534 | 6549 | CGAGAGGGTTGCCCGG | 107 | 2716 |
| 1210599 | N/A | N/A | 6878 | 6893 | AAGCACCTCCCGGCGA | 141 | 2717 |
| 1210627 | N/A | N/A | 7537 | 7552 | GCTCGCTTGGTTCCTA | 75 | 2718 |
| 1210655 | N/A | N/A | 8428 | 8443 | CAGGCACAATGGAGAT | 100 | 2719 |
| 1210683 | N/A | N/A | 8895 | 8910 | CACCGTTTGGTGATGA | 89 | 2720 |
| 1210711 | N/A | N/A | 9190 | 9205 | ACAGCTCCCAGGTCGA | 55 | 2721 |
| 1210739 | N/A | N/A | 9477 | 9492 | GACCCCAAGGCTTAGC | 101 | 2722 |
| 1210759 | N/A | N/A | 9795 | 9810 | GTATCTCTAGGTCCTT | 4 | 2723 |
| 1210785 | N/A | N/A | 10367 | 10382 | GGACAAGCAGTGCTAC | 55 | 2724 |
| 1210813 | N/A | N/A | 10615 | 10630 | GCCGGGTTTTAACACG | 162 | 2725 |
| 1210841 | N/A | N/A | 11143 | 11158 | GGAGGATTCGCCACTT | 72 | 2726 |
| 1210869 | N/A | N/A | 11771 | 11786 | CAACCTAGATGTTAGA | 58 | 2727 |
| 1210897 | N/A | N/A | 12182 | 12197 | AGAGATTTCCCATCCG | 30 | 2728 |
| 1210925 | N/A | N/A | 12695 | 12710 | AGGCCGAATGACTATA | 190 | 2729 |
| 1210953 | N/A | N/A | 13578 | 13593 | CCGTGACAATGCTGAG | 35 | 2730 |
| 1210981 | N/A | N/A | 13971 | 13986 | AATGGAGAGACTCCCG | 122 | 2731 |
| 1211009 | N/A | N/A | 14454 | 14469 | GAAACCCGTGGAAGAC | 29 | 2732 |
| 1211037 | N/A | N/A | 14996 | 15011 | AACTTGGACTTGATAT | 91 | 2733 |
| 1211065 | N/A | N/A | 15680 | 15695 | TGAGACTGGCAAGATT | 71 | 2734 |
| 1211093 | N/A | N/A | 16376 | 16391 | GCCAGATGACTCCGGG | 259 | 2735 |
| 1211119 | N/A | N/A | 16938 | 16953 | TGTGAGGCACCAGCGA | 46 | 2736 |
| 1211146 | N/A | N/A | 17671 | 17686 | CTGGCATGCCCAAGAC | 113 | 2737 |
| 1211174 | N/A | N/A | 18674 | 18689 | CCTACCTCAATGCCTG | 46 | 2738 |
| 1211202 | N/A | N/A | 19030 | 19045 | AACAGGGAATAATTCG | 38 | 2739 |
| 1211226 | N/A | N/A | 19250 | 19265 | GGATATCAATCTCCCT | 134 | 2740 |
| 1211253 | N/A | N/A | 19855 | 19870 | CCCCCTGGGCTTCAAC | 124 | 2741 |
| 1211281 | N/A | N/A | 20400 | 20415 | ATACATCAGCCCCCTC | 96 | 2742 |
| 1211309 | N/A | N/A | 21601 | 21616 | GGATTCGACATGCAAG | 19 | 2743 |
| 1211336 | N/A | N/A | 22577 | 22592 | GGTTAGGACAGCCCAG | 84 | 2744 |
| 1211363 | N/A | N/A | 23178 | 23193 | AGGAACTACTGTTGCA | 89 | 2745 |
| 1211411 | N/A | N/A | 25706 | 25721 | GACATTGTAGCTATAT | 57 | 2746 |
| 1211437 | N/A | N/A | 26620 | 26635 | GCACTTTGGTAGATGC | 91 | 2747 |
| 1211459 | N/A | N/A | 27349 | 27364 | AAACAACCTGAGTTCC | 142 | 2748 |
| 1211487 | N/A | N/A | 27928 | 27943 | TCACTAGGAGTTAAAG | 48 | 2749 |
| 1211521 | N/A | N/A | 28862 | 28877 | GCTCTACAGATAGCCT | 132 | 2750 |
| 1211549 | N/A | N/A | 29496 | 29511 | CAGTACCTAGACATAC | 73 | 2751 |
| 1211577 | N/A | N/A | 30131 | 30146 | CCCAATCATCGCTTAT | 50 | 2752 |
| 1211604 | N/A | N/A | 30795 | 30810 | ATCGCAATACCTAGGA | 52 | 2753 |
| 1211632 | N/A | N/A | 31292 | 31307 | CTAACTTCTTACTAGT | 96 | 2754 |
| 1211657 | N/A | N/A | 31677 | 31692 | AACCTACAGTCAGCTC | 52 | 2755 |
| 1211685 | N/A | N/A | 32488 | 32503 | CTATAGGTTCTGAAAA | 143 | 2756 |
| 1211713 | N/A | N/A | 33357 | 33372 | AATGACCATTGCTGCC | 77 | 2757 |
| 1211741 | N/A | N/A | 33849 | 33864 | CGGAGGATGCTACCCA | 133 | 2758 |
| 1211769 | N/A | N/A | 34278 | 34293 | CTACCTTAAGGACTGT | 45 | 2759 |
| 1211797 | N/A | N/A | 34667 | 34682 | GGAGCATAGGTCATCT | 132 | 2760 |
| 1211825 | N/A | N/A | 34997 | 35012 | TGATTGTTGTCATGAG | 13 | 2761 |
| 1211853 | N/A | N/A | 35304 | 35319 | CACTTATCATCATGCA | 68 | 2762 |
| 1211881 | N/A | N/A | 35738 | 35753 | CTGTTAAGCCTGTCCT | 60 | 2763 |
| 1211909 | N/A | N/A | 36176 | 36191 | GCACTGGATATGCAGG | 100 | 2764 |
| 1211937 | N/A | N/A | 36528 | 36543 | TATATGCCACTCTACA | 101 | 2765 |

TABLE 47
Percent control of human PMP22 RNA with 3-10-3 cEt gapmers

| | SEQ | SEQ | SEQ | SEQ | | | |
|---|---|---|---|---|---|---|---|
| | ID | ID | ID | ID | | | |
| | NO: 1 | NO: 1 | NO: 2 | NO: 2 | | PMP22 | SEQ |
| Compound | Start | Stop | Start | Stop | | (% | ID |
| ID | Site | Site | Site | Site | Sequence (5′ to 3′) | UTC) | NO |
| 684267 | 864 | 879 | 37227 | 37242 | ATCTTCAATCAACAGC | 25 | 30 |
| 684394 | 1489 | 1504 | 37852 | 37867 | ATTATTCAGGTCTCCA | 24 | 31 |
| 684394 | 1489 | 1504 | 37852 | 37867 | ATTATTCAGGTCTCCA | 10 | 31 |
| 1079084 | N/A | N/A | 28713 | 28728 | GTTCTAAGTCCCAAGT | 62 | 2766 |
| 1205214 | N/A | N/A | 24442 | 24457 | ATGAGTCAAGATACCA | 26 | 2767 |
| 1209868 | N/A | N/A | 3955 | 3970 | AAGGTTTATGGTGGTG | 142 | 2768 |
| 1209896 | N/A | N/A | 8393 | 8408 | ATGTTAAACTAAGTCA | 72 | 2769 |
| 1209924 | N/A | N/A | 9874 | 9889 | GATCTATGAGTAGCTC | 99 | 2770 |
| 1209952 | N/A | N/A | 12042 | 12057 | ATCAAGGCAAGGCCCA | 74 | 2771 |
| 1209980 | N/A | N/A | 15617 | 15632 | AACCTATTGATAGTCA | 31 | 2772 |
| 1210008 | N/A | N/A | 16814 | 16829 | TATAACTGGTCCTTCC | 75 | 2773 |
| 1210036 | N/A | N/A | 19570 | 19585 | TTATTCAATGAACTGC | 12 | 2774 |
| 1210064 | N/A | N/A | 21912 | 21927 | GTTATTAGCACATTGG | 11 | 2775 |
| 1210093 | N/A | N/A | 23555 | 23570 | AATTGTAACACCTCTA | 36 | 2776 |
| 1210121 | N/A | N/A | 25199 | 25214 | CTGACTATAAGGGCAA | 82 | 2777 |
| 1210149 | N/A | N/A | 26455 | 26470 | AGATACTGTCTTCACC | 49 | 2778 |
| 1210177 | N/A | N/A | 27707 | 27722 | AGAGGTAAAGATCACG | 32 | 2779 |
| 1210205 | N/A | N/A | 29732 | 29747 | GGTTAATCATTTACTT | 78 | 2780 |
| 1210234 | N/A | N/A | 30068 | 30083 | ATCCATATTATCTTGA | 9 | 2781 |
| 1210262 | N/A | N/A | 31299 | 31314 | CTAATTACTAACTTCT | 57 | 2782 |
| 1210290 | N/A | N/A | 33200 | 33215 | TTTTATTAATCCCCCC | 116 | 2783 |
| 1210318 | N/A | N/A | 35361 | 35376 | GAAACATGACCTTGGC | 54 | 2784 |
| 1210348 | N/A | N/A | 2841 | 2856 | AAAACTCACCCGGCCA | 97 | 2785 |
| 1210376 | N/A | N/A | 3559 | 3574 | CTTATGTGATCACAAC | 165 | 2786 |
| 1210404 | N/A | N/A | 4498 | 4513 | CCGTGCGCAGGCCAGC | 240 | 2787 |
| 1210432 | N/A | N/A | 4795 | 4810 | CTACTGGATAGCATGG | 165 | 2788 |
| 1210460 | N/A | N/A | 5114 | 5129 | CAGCCAAATGTAGCTC | 105 | 2789 |
| 1210488 | N/A | N/A | 5624 | 5639 | GCACCCTCACTGGAAG | 117 | 2790 |
| 1210516 | N/A | N/A | 5836 | 5851 | TCAGCAAGGCGAGAAC | 81 | 2791 |
| 1210544 | N/A | N/A | 6304 | 6319 | CGGACGGGAGAGAGAG | 111 | 2792 |
| 1210572 | N/A | N/A | 6537 | 6552 | GCTCGAGAGGGTTGCC | 102 | 2793 |
| 1210600 | N/A | N/A | 6899 | 6914 | CTGCACGCTTCCACCC | 108 | 2794 |
| 1210628 | N/A | N/A | 7539 | 7554 | GCGCTCGCTTGGTTCC | 169 | 2795 |
| 1210656 | N/A | N/A | 8437 | 8452 | CATCATCACCAGGCAC | 67 | 2796 |
| 1210684 | N/A | N/A | 8897 | 8912 | CTCACCGTTTGGTGAT | 103 | 2797 |
| 1210712 | N/A | N/A | 9192 | 9207 | TCACAGCTCCCAGGTC | 67 | 2798 |
| 1210740 | N/A | N/A | 9478 | 9493 | GGACCCCAAGGCTTAG | 117 | 2799 |
| 1210760 | N/A | N/A | 9839 | 9854 | ATTTCCGTGGCCTTTT | 30 | 2800 |
| 1210786 | N/A | N/A | 10388 | 10403 | AACCGGATGCTGTGGC | 46 | 2801 |
| 1210814 | N/A | N/A | 10617 | 10632 | TCGCCGGGTTTTAACA | 54 | 2802 |
| 1210842 | N/A | N/A | 11145 | 11160 | CTGGAGGATTCGCCAC | 82 | 2803 |
| 1210870 | N/A | N/A | 11821 | 11836 | ATTAAGATGTAGCCTG | 21 | 2804 |
| 1210898 | N/A | N/A | 12207 | 12222 | GATGGATCAGATTCTA | 109 | 2805 |
| 1210926 | N/A | N/A | 12703 | 12718 | TTCCCCCAAGGCCGAA | 89 | 2806 |
| 1210954 | N/A | N/A | 13580 | 13595 | ACCCGTGACAATGCTG | 48 | 2807 |
| 1210982 | N/A | N/A | 14001 | 14016 | AAATAGTCCTGCATGA | 121 | 2808 |
| 1211010 | N/A | N/A | 14458 | 14473 | CTGAGAAACCCGTGGA | 64 | 2809 |
| 1211038 | N/A | N/A | 15043 | 15058 | CGTCAGGTCCACACAA | 58 | 2810 |
| 1211066 | N/A | N/A | 15704 | 15719 | CCAAGGGCTCAGGTTG | 86 | 2811 |
| 1211094 | N/A | N/A | 16401 | 16416 | TCGATGGGATAGGAAG | 76 | 2812 |
| 1211120 | N/A | N/A | 16950 | 16965 | AGTACCACAGCCTGTG | 170 | 2813 |
| 1211147 | N/A | N/A | 17679 | 17694 | GTTAACCCCTGGCATG | 132 | 2814 |
| 1211175 | N/A | N/A | 18682 | 18697 | CTTCAGGTCCTACCTC | 71 | 2815 |
| 1211203 | N/A | N/A | 19054 | 19069 | CATGAACTGCATCAGT | 100 | 2816 |
| 1211227 | N/A | N/A | 19262 | 19277 | TTGTACGATGAAGGAT | 37 | 2817 |
| 1211254 | N/A | N/A | 19901 | 19916 | CTTCGCCCACCAGCTC | 70 | 2818 |
| 1211282 | N/A | N/A | 20417 | 20432 | GCTGAGCAATGAAGGA | 44 | 2819 |
| 1211310 | N/A | N/A | 21606 | 21621 | AGGTTGGATTCGACAT | 25 | 2820 |
| 1211337 | N/A | N/A | 22581 | 22596 | CTCTGGTTAGGACAGC | 47 | 2821 |
| 1211364 | N/A | N/A | 23418 | 23433 | TTATGGTATATCCTCA | 20 | 2822 |
| 1211412 | N/A | N/A | 25710 | 25725 | GAGAGACATTGTAGCT | 46 | 2823 |
| 1211438 | N/A | N/A | 26688 | 26703 | GGAGGAGCACTTTGCA | 44 | 2824 |
| 1211460 | N/A | N/A | 27387 | 27402 | TCCGCTGCAAACTCAT | 74 | 2825 |
| 1211488 | N/A | N/A | 27938 | 27953 | TATAGTTCCATCACTA | 115 | 2826 |
| 1211522 | N/A | N/A | 28907 | 28922 | GAGGCATAATGTAATC | 69 | 2827 |
| 1211550 | N/A | N/A | 29498 | 29513 | CCCAGTACCTAGACAT | 63 | 2828 |
| 1211578 | N/A | N/A | 30143 | 30158 | TGGGCATGAAAACCCA | 141 | 2829 |
| 1211605 | N/A | N/A | 30800 | 30815 | CTTAAATCGCAATACC | 59 | 2830 |
| 1211633 | N/A | N/A | 31309 | 31324 | ACTTAGCTCTCTAATT | 64 | 2831 |
| 1211658 | N/A | N/A | 31712 | 31727 | GCTGTAATCTAGAGCA | 92 | 2832 |
| 1211686 | N/A | N/A | 32492 | 32507 | ATGGCTATAGGTTCTG | 28 | 2833 |
| 1211714 | N/A | N/A | 33361 | 33376 | TCCAAATGACCATTGC | 16 | 2834 |
| 1211742 | N/A | N/A | 33853 | 33868 | CCTACGGAGGATGCTA | 103 | 2835 |
| 1211770 | N/A | N/A | 34282 | 34297 | GCTCCTACCTTAAGGA | 145 | 2836 |
| 1211798 | N/A | N/A | 34669 | 34684 | TGGGAGCATAGGTCAT | 168 | 2837 |
| 1211826 | N/A | N/A | 35014 | 35029 | AGGATACACACTTTAT | 37 | 2838 |
| 1211854 | N/A | N/A | 35313 | 35328 | GCAGGACAACACTTAT | 76 | 2839 |
| 1211882 | N/A | N/A | 35749 | 35764 | CATGAACCACCCTGTT | 187 | 2840 |
| 1211910 | N/A | N/A | 36180 | 36195 | AAGGGCACTGGATATG | 163 | 2841 |
| 1211938 | N/A | N/A | 36530 | 36545 | TCTATATGCCACTCTA | 52 | 2842 |

TABLE 48
Percent control of human PMP22 RNA with 3-10-3 cEt gapmers

| | SEQ | SEQ | SEQ | SEQ | | | |
|---|---|---|---|---|---|---|---|
| | ID | ID | ID | ID | | | |
| | NO: 1 | NO: 1 | NO: 2 | NO: 2 | | PMP22 | SEQ |
| Compound | Start | Stop | Start | Stop | | (% | ID |
| ID | Site | Site | Site | Site | Sequence (5′ to 3′) | UTC) | NO |
| 684267 | 864 | 879 | 37227 | 37242 | ATCTTCAATCAACAGC | 17 | 30 |
| 684394 | 1489 | 1504 | 37852 | 37867 | ATTATTCAGGTCTCCA | 7 | 31 |
| 684394 | 1489 | 1504 | 37852 | 37867 | ATTATTCAGGTCTCCA | 15 | 31 |
| 1205231 | N/A | N/A | 26701 | 26716 | TAGAGGTTCTTCTGGA | 41 | 2843 |
| 1209869 | N/A | N/A | 3956 | 3971 | AAAGGTTTATGGTGGT | 105 | 2844 |
| 1209897 | N/A | N/A | 8394 | 8409 | AATGTTAAACTAAGTC | 72 | 2845 |
| 1209925 | N/A | N/A | 9925 | 9940 | GATCTAAACTGGTTTC | 83 | 2846 |
| 1209953 | N/A | N/A | 12232 | 12247 | CTTAAATCCTGCCCAT | 68 | 2847 |
| 1209981 | N/A | N/A | 15618 | 15633 | CAACCTATTGATAGTC | 39 | 2848 |
| 1210009 | N/A | N/A | 16819 | 16834 | CTTCCTATAACTGGTC | 39 | 2849 |
| 1210037 | N/A | N/A | 19583 | 19598 | AACTTTGATACAGTTA | 99 | 2850 |
| 1210065 | N/A | N/A | 21913 | 21928 | GGTTATTAGCACATTG | 9 | 2851 |
| 1210094 | N/A | N/A | 23610 | 23625 | TATATTAGGTTGATAC | 52 | 2852 |
| 1210122 | N/A | N/A | 25264 | 25279 | TGTATAGAAAACTTGT | 52 | 2853 |
| 1210150 | N/A | N/A | 26462 | 26477 | AATCCTGAGATACTGT | 96 | 2854 |
| 1210178 | N/A | N/A | 27748 | 27763 | TAGCTTAAAACCACTA | 54 | 2855 |
| 1210206 | N/A | N/A | 29744 | 29759 | TTAATGAGAAGTGGTT | 12 | 2856 |
| 1210235 | N/A | N/A | 30087 | 30102 | ATGAAAGTTCTGGTTC | 18 | 2857 |
| 1210263 | N/A | N/A | 31316 | 31331 | CTAATCTACTTAGCTC | 102 | 2858 |
| 1210291 | N/A | N/A | 33288 | 33303 | CATAATCATCCGTCCC | 35 | 2859 |
| 1210319 | N/A | N/A | 35393 | 35408 | ACTTATCTAATGAAGG | 75 | 2860 |
| 1210349 | N/A | N/A | 2887 | 2902 | CTTGTAAAGCATAGGC | 91 | 2861 |
| 1210377 | N/A | N/A | 3562 | 3577 | ACACTTATGTGATCAC | 104 | 2862 |
| 1210405 | N/A | N/A | 4500 | 4515 | TCCCGTGCGCAGGCCA | 106 | 2863 |
| 1210433 | N/A | N/A | 4803 | 4818 | CCGGCCGACTACTGGA | 96 | 2864 |
| 1210461 | N/A | N/A | 5151 | 5166 | CCGAGAAACTGGCTCC | 81 | 2865 |
| 1210489 | N/A | N/A | 5626 | 5641 | TGGCACCCTCACTGGA | 64 | 2866 |
| 1210517 | N/A | N/A | 5884 | 5899 | TCCGCCACAGGGACTG | 66 | 2867 |
| 1210545 | N/A | N/A | 6308 | 6323 | CCAGCGGACGGGAGAG | 117 | 2868 |
| 1210573 | N/A | N/A | 6540 | 6555 | ATGGCTCGAGAGGGTT | 125 | 2869 |
| 1210601 | N/A | N/A | 6971 | 6986 | AAAACAAGCGGTTCGC | 76 | 2870 |
| 1210629 | N/A | N/A | 7558 | 7573 | GCGCAGCTAACCCAGC | 125 | 2871 |
| 1210657 | N/A | N/A | 8455 | 8470 | CTCCTATCAGTCTGAT | 86 | 2872 |
| 1210685 | N/A | N/A | 8904 | 8919 | AACCAGCCTCACCGTT | 80 | 2873 |
| 1210713 | N/A | N/A | 9197 | 9212 | CACCTTCACAGCTCCC | 26 | 2874 |
| 1210741 | N/A | N/A | 9479 | 9494 | AGGACCCCAAGGCTTA | 77 | 2875 |
| 1210761 | N/A | N/A | 9844 | 9859 | GCTGTATTTCCGTGGC | 68 | 2876 |
| 1210787 | N/A | N/A | 10390 | 10405 | GAAACCGGATGCTGTG | 27 | 2877 |
| 1210815 | N/A | N/A | 10625 | 10640 | CTGAAACTTCGCCGGG | 60 | 2878 |
| 1210843 | N/A | N/A | 11147 | 11162 | CCCTGGAGGATTCGCC | 72 | 2879 |
| 1210871 | N/A | N/A | 11823 | 11838 | ATATTAAGATGTAGCC | 30 | 2880 |
| 1210899 | N/A | N/A | 12209 | 12224 | AGGATGGATCAGATTC | 72 | 2881 |
| 1210927 | N/A | N/A | 12733 | 12748 | GCCAGGTTTCTATGAT | 85 | 2882 |
| 1210955 | N/A | N/A | 13584 | 13599 | AGGGACCCGTGACAAT | 101 | 2883 |
| 1210983 | N/A | N/A | 14016 | 14031 | CGAGAGTTGTTCAAGA | 48 | 2884 |
| 1211011 | N/A | N/A | 14460 | 14475 | CACTGAGAAACCCGTG | 115 | 2885 |
| 1211039 | N/A | N/A | 15066 | 15081 | GTATTCTGACCCATTC | 18 | 2886 |
| 1211067 | N/A | N/A | 15725 | 15740 | GACAGCGATGATAGGA | 7 | 2887 |
| 1211095 | N/A | N/A | 16428 | 16443 | TAGGCATATTGCAGAG | 39 | 2888 |
| 1211121 | N/A | N/A | 16952 | 16967 | TCAGTACCACAGCCTG | 61 | 2889 |
| 1211148 | N/A | N/A | 17725 | 17740 | CATCACTGGCTGTTCA | 60 | 2890 |
| 1211176 | N/A | N/A | 18686 | 18701 | TCAACTTCAGGTCCTA | 55 | 2891 |
| 1211204 | N/A | N/A | 19055 | 19070 | TCATGAACTGCATCAG | 123 | 2892 |
| 1211228 | N/A | N/A | 19264 | 19279 | CATTGTACGATGAAGG | 4 | 2893 |
| 1211255 | N/A | N/A | 19903 | 19918 | TGCTTCGCCCACCAGC | 99 | 2894 |
| 1211283 | N/A | N/A | 20474 | 20489 | CTCGAGTTGCACAAAG | 87 | 2895 |
| 1211311 | N/A | N/A | 21609 | 21624 | AGCAGGTTGGATTCGA | 70 | 2896 |
| 1211338 | N/A | N/A | 22590 | 22605 | ATTTATGTGCTCTGGT | 22 | 2897 |
| 1211365 | N/A | N/A | 23441 | 23456 | GCATTTCTATGAGGGA | 20 | 2898 |
| 1211385 | N/A | N/A | 24545 | 24560 | TGAGCAATGACAGATA | 26 | 2899 |
| 1211413 | N/A | N/A | 26018 | 26033 | CACTCATAAGATATGG | 31 | 2900 |
| 1211461 | N/A | N/A | 27390 | 27405 | CCATCCGCTGCAAACT | 59 | 2901 |
| 1211489 | N/A | N/A | 28304 | 28319 | GCCTGAAGGGCCATGA | 98 | 2902 |
| 1211511 | N/A | N/A | 28718 | 28733 | GGAGAGTTCTAAGTCC | 118 | 2903 |
| 1211523 | N/A | N/A | 28932 | 28947 | CTTAGCACATCAGGGC | 23 | 2904 |
| 1211551 | N/A | N/A | 29544 | 29559 | ATGCTACATCCTTTGC | 106 | 2905 |
| 1211579 | N/A | N/A | 30165 | 30180 | TGAGCGAGGCACATCT | 67 | 2906 |
| 1211606 | N/A | N/A | 30803 | 30818 | ATACTTAAATCGCAAT | 49 | 2907 |
| 1211634 | N/A | N/A | 31312 | 31327 | TCTACTTAGCTCTCTA | 32 | 2908 |
| 1211659 | N/A | N/A | 31789 | 31804 | TTCCTAACTGTCAGCC | 72 | 2909 |
| 1211687 | N/A | N/A | 32499 | 32514 | GGAATAGATGGCTATA | 37 | 2910 |
| 1211715 | N/A | N/A | 33367 | 33382 | TCAGTATCCAAATGAC | 60 | 2911 |
| 1211743 | N/A | N/A | 33855 | 33870 | TGCCTACGGAGGATGC | 118 | 2912 |
| 1211771 | N/A | N/A | 34294 | 34309 | AAGTGAGACATGGCTC | 45 | 2913 |
| 1211799 | N/A | N/A | 34674 | 34689 | GAGTCTGGGAGCATAG | 78 | 2914 |
| 1211827 | N/A | N/A | 35048 | 35063 | AGCAGTAAACTTAGAT | 32 | 2915 |
| 1211855 | N/A | N/A | 35316 | 35331 | AGGGCAGGACAACACT | 112 | 2916 |
| 1211883 | N/A | N/A | 35758 | 35773 | AATACGCCACATGAAC | 83 | 2917 |
| 1211911 | N/A | N/A | 36213 | 36228 | CCCAAGGTTGCATTTG | 47 | 2918 |
| 1211939 | N/A | N/A | 36535 | 36550 | GGAAATCTATATGCCA | 94 | 2919 |

TABLE 49
Percent control of human PMP22 RNA with 3-10-3 cEt gapmers

| | SEQ | SEQ | SEQ | SEQ | | | |
|---|---|---|---|---|---|---|---|
| | ID | ID | ID | ID | | | |
| | NO: 1 | NO: 1 | NO: 2 | NO: 2 | | PMP22 | SEQ |
| Compound | Start | Stop | Start | Stop | | (% | ID |
| ID | Site | Site | Site | Site | Sequence (5′ to 3′) | UTC) | NO |
| 684267 | 864 | 879 | 37227 | 37242 | ATCTTCAATCAACAGC | 16 | 30 |
| 684394 | 1489 | 1504 | 37852 | 37867 | ATTATTCAGGTCTCCA | 12 | 31 |
| 684394 | 1489 | 1504 | 37852 | 37867 | ATTATTCAGGTCTCCA | 10 | 31 |
| 1076621 | N/A | N/A | 9483 | 9498 | ATTAAGGACCCCAAGG | 150 | 2920 |
| 1209870 | N/A | N/A | 4022 | 4037 | GCAATTTCTCAAGTTC | 113 | 2921 |
| 1209898 | N/A | N/A | 8423 | 8438 | ACAATGGAGATACTGT | 86 | 2922 |
| 1209926 | N/A | N/A | 9981 | 9996 | CTGGATTATGCAAAGC | 16 | 2923 |
| 1209954 | N/A | N/A | 12239 | 12254 | GTATTGACTTAAATCC | 27 | 2924 |
| 1209982 | N/A | N/A | 15619 | 15634 | ACAACCTATTGATAGT | 103 | 2925 |
| 1210010 | N/A | N/A | 17032 | 17047 | CAGAATGAGCTTACAA | 28 | 2926 |
| 1210038 | N/A | N/A | 19584 | 19599 | TAACTTTGATACAGTT | 86 | 2927 |
| 1210066 | N/A | N/A | 22456 | 22471 | TTTTATTGGGTTGTCA | 16 | 2928 |
| 1210095 | N/A | N/A | 23698 | 23713 | AGTGATAGCTACCTGC | 34 | 2929 |
| 1210123 | N/A | N/A | 25287 | 25302 | ATTAACAAATCTGTCC | 50 | 2930 |
| 1210151 | N/A | N/A | 26536 | 26551 | TGGGAAATGTCCTTCC | 99 | 2931 |
| 1210179 | N/A | N/A | 27749 | 27764 | ATAGCTTAAAACCACT | 36 | 2932 |
| 1210207 | N/A | N/A | 29745 | 29760 | TTTAATGAGAAGTGGT | 14 | 2933 |
| 1210236 | N/A | N/A | 30121 | 30136 | GCTTATGAAACTAACA | 19 | 2934 |
| 1210264 | N/A | N/A | 31375 | 31390 | ATGTTAAGTTGTCACT | 72 | 2935 |
| 1210292 | N/A | N/A | 33645 | 33660 | CAAAGTGTACTTTGGT | 90 | 2936 |
| 1210320 | N/A | N/A | 35488 | 35503 | TTAATTATCTTGCCCC | 63 | 2937 |
| 1210350 | N/A | N/A | 2896 | 2911 | TAGGCAATTCTTGTAA | 149 | 2938 |
| 1210378 | N/A | N/A | 3790 | 3805 | AGCTTGTAACTCTGAT | 126 | 2939 |
| 1210406 | N/A | N/A | 4506 | 4521 | TGAGACTCCCGTGCGC | 110 | 2940 |
| 1210434 | N/A | N/A | 4806 | 4821 | AGTCCGGCCGACTACT | 121 | 2941 |
| 1210462 | N/A | N/A | 5154 | 5169 | TGACCGAGAAACTGGC | 110 | 2942 |
| 1210490 | N/A | N/A | 5635 | 5650 | TGCGCTTTCTGGCACC | 119 | 2943 |
| 1210518 | N/A | N/A | 5894 | 5909 | TCTCGGGATGTCCGCC | 124 | 2944 |
| 1210546 | N/A | N/A | 6317 | 6332 | AGTAGATGTCCAGCGG | 137 | 2945 |
| 1210574 | N/A | N/A | 6584 | 6599 | TCCGGAGAGGTGGTGC | 155 | 2946 |
| 1210602 | N/A | N/A | 6997 | 7012 | ACGGAACATCTTTTGC | 133 | 2947 |
| 1210630 | N/A | N/A | 7562 | 7577 | ACCTGCGCAGCTAACC | 165 | 2948 |
| 1210658 | N/A | N/A | 8457 | 8472 | AGCTCCTATCAGTCTG | 132 | 2949 |
| 1210686 | N/A | N/A | 8927 | 8942 | GAGGACAAGCTCATGG | 85 | 2950 |
| 1210714 | N/A | N/A | 9198 | 9213 | CCACCTTCACAGCTCC | 81 | 2951 |
| 1210762 | N/A | N/A | 9867 | 9882 | GAGTAGCTCCAGCAAC | 61 | 2952 |
| 1210788 | N/A | N/A | 10394 | 10409 | GGGAGAAACCGGATGC | 94 | 2953 |
| 1210816 | N/A | N/A | 10627 | 10642 | TGCTGAAACTTCGCCG | 83 | 2954 |
| 1210844 | N/A | N/A | 11148 | 11163 | GCCCTGGAGGATTCGC | 95 | 2955 |
| 1210872 | N/A | N/A | 11863 | 11878 | GAGTCAAAGTCAGTTA | 20 | 2956 |
| 1210900 | N/A | N/A | 12252 | 12267 | CTCCCCGTTGCCTGTA | 85 | 2957 |
| 1210928 | N/A | N/A | 12742 | 12757 | GTATTTGCTGCCAGGT | 6 | 2958 |
| 1210956 | N/A | N/A | 13587 | 13602 | CTGAGGGACCCGTGAC | 82 | 2959 |
| 1210984 | N/A | N/A | 14026 | 14041 | CTCTGGTACACGAGAG | 160 | 2960 |
| 1211012 | N/A | N/A | 14469 | 14484 | CAAATGGACCACTGAG | 69 | 2961 |
| 1211040 | N/A | N/A | 15068 | 15083 | CAGTATTCTGACCCAT | 19 | 2962 |
| 1211068 | N/A | N/A | 15729 | 15744 | TGAAGACAGCGATGAT | 15 | 2963 |
| 1211096 | N/A | N/A | 16448 | 16463 | GTGGTAGGATGAACAT | 46 | 2964 |
| 1211122 | N/A | N/A | 16970 | 16985 | ATGTCCCAACTGTCCT | 78 | 2965 |
| 1211149 | N/A | N/A | 17771 | 17786 | GCCGAGGTAATTTCTT | 96 | 2966 |
| 1211177 | N/A | N/A | 18719 | 18734 | GCTCCGGGACCCATGC | 148 | 2967 |
| 1211205 | N/A | N/A | 19056 | 19071 | GTCATGAACTGCATCA | 92 | 2968 |
| 1211229 | N/A | N/A | 19303 | 19318 | ACTTACTCCACCAGAT | 94 | 2969 |
| 1211256 | N/A | N/A | 19906 | 19921 | ATATGCTTCGCCCACC | 167 | 2970 |
| 1211284 | N/A | N/A | 20476 | 20491 | AGCTCGAGTTGCACAA | 107 | 2971 |
| 1211312 | N/A | N/A | 21685 | 21700 | CATGGACAAGATGTAA | 112 | 2972 |
| 1211339 | N/A | N/A | 22615 | 22630 | CGTGCAAAGCCTGACT | 95 | 2973 |
| 1211366 | N/A | N/A | 23452 | 23467 | CATTGATTGTAGCATT | 15 | 2974 |
| 1211386 | N/A | N/A | 24595 | 24610 | TTGCAACTGGAACTGG | 100 | 2975 |
| 1211414 | N/A | N/A | 26032 | 26047 | GAATGGGTTCAAGGCA | 23 | 2976 |
| 1211439 | N/A | N/A | 26709 | 26724 | ATCCAGCATAGAGGTT | 74 | 2977 |
| 1211462 | N/A | N/A | 27489 | 27504 | AAGGCTTACACTTCCT | 101 | 2978 |
| 1211490 | N/A | N/A | 28317 | 28332 | CTCGAGGTGCAGGGCC | 178 | 2979 |
| 1211512 | N/A | N/A | 28767 | 28782 | CCAGATCCTCTAAGTT | 79 | 2980 |
| 1211524 | N/A | N/A | 28947 | 28962 | ACTACTTTGCTAGTTC | 122 | 2981 |
| 1211552 | N/A | N/A | 29549 | 29564 | AAGAGATGCTACATCC | 89 | 2982 |
| 1211580 | N/A | N/A | 30170 | 30185 | AGGTTTGAGCGAGGCA | 5 | 2983 |
| 1211607 | N/A | N/A | 30818 | 30833 | AGTGGATTAGTAAATA | 59 | 2984 |
| 1211635 | N/A | N/A | 31315 | 31330 | TAATCTACTTAGCTCT | 82 | 2985 |
| 1211660 | N/A | N/A | 31794 | 31809 | GATAGTTCCTAACTGT | 108 | 2986 |
| 1211688 | N/A | N/A | 32504 | 32519 | GTCAAGGAATAGATGG | 57 | 2987 |
| 1211716 | N/A | N/A | 33394 | 33409 | TGATTGAAGCCCACTC | 47 | 2988 |
| 1211744 | N/A | N/A | 33859 | 33874 | GTAATGCCTACGGAGG | 88 | 2989 |
| 1211772 | N/A | N/A | 34296 | 34311 | ATAAGTGAGACATGGC | 7 | 2990 |
| 1211800 | N/A | N/A | 34697 | 34712 | CCGGGACTCCCTGGTA | 101 | 2991 |
| 1211828 | N/A | N/A | 35058 | 35073 | AACCGTGATAAGCAGT | 49 | 2992 |
| 1211856 | N/A | N/A | 35332 | 35347 | TTAACAGAGTGCTAGC | 191 | 2993 |
| 1211884 | N/A | N/A | 35760 | 35775 | GGAATACGCCACATGA | 45 | 2994 |
| 1211912 | N/A | N/A | 36245 | 36260 | TGATCAAAGGCAAGCT | 100 | 2995 |
| 1211940 | N/A | N/A | 36541 | 36556 | ACCCCTGGAAATCTAT | 130 | 2996 |

TABLE 50
Percent control of human PMP22 RNA with 3-10-3 cEt gapmers

| | SEQ | SEQ | SEQ | SEQ | | | |
|---|---|---|---|---|---|---|---|
| | ID | ID | ID | ID | | | |
| | NO: 1 | NO: 1 | NO: 2 | NO: 2 | | PMP22 | SEQ |
| Compound | Start | Stop | Start | Stop | | (% | ID |
| ID | Site | Site | Site | Site | Sequence (5′ to 3′) | UTC) | NO |
| 684267 | 864 | 879 | 37227 | 37242 | ATCTTCAATCAACAGC | 20 | 30 |
| 684394 | 1489 | 1504 | 37852 | 37867 | ATTATTCAGGTCTCCA | 6 | 31 |
| 684394 | 1489 | 1504 | 37852 | 37867 | ATTATTCAGGTCTCCA | 12 | 31 |
| 1076620 | N/A | N/A | 9488 | 9503 | TCTGGATTAAGGACCC | 27 | 2997 |
| 1209871 | N/A | N/A | 4059 | 4074 | AACCTAATCACCCTGC | 124 | 2998 |
| 1209899 | N/A | N/A | 8550 | 8565 | CAACCTTAGACACCTG | 56 | 2999 |
| 1209927 | N/A | N/A | 9990 | 10005 | GCAAAGCAACTGGATT | 113 | 3000 |
| 1209955 | N/A | N/A | 12278 | 12293 | TACCTTAGGTCACAGG | 122 | 3001 |
| 1209983 | N/A | N/A | 15631 | 15646 | CTAATTCCTCACACAA | 65 | 3002 |
| 1210011 | N/A | N/A | 17164 | 17179 | CTTAACATCATTGTCA | 30 | 3003 |
| 1210039 | N/A | N/A | 19585 | 19600 | CTAACTTTGATACAGT | 97 | 3004 |
| 1210067 | N/A | N/A | 22457 | 22472 | ATTTTATTGGGTTGTC | 7 | 3005 |
| 1210096 | N/A | N/A | 23699 | 23714 | AAGTGATAGCTACCTG | 57 | 3006 |
| 1210124 | N/A | N/A | 25302 | 25317 | AGATTACATAAGAGGA | 20 | 3007 |
| 1210152 | N/A | N/A | 26554 | 26569 | AAAGGGATTCACTTTG | 98 | 3008 |
| 1210180 | N/A | N/A | 27778 | 27793 | CTTATCAGAACTTCTG | 48 | 3009 |
| 1210208 | N/A | N/A | 29746 | 29761 | GTTTAATGAGAAGTGG | 7 | 3010 |
| 1210237 | N/A | N/A | 30124 | 30139 | ATCGCTTATGAAACTA | 9 | 3011 |
| 1210265 | N/A | N/A | 31479 | 31494 | CATTTGCCGGGCATGC | 124 | 3012 |
| 1210293 | N/A | N/A | 33686 | 33701 | AGTATTGAAAGGAGCA | 70 | 3013 |
| 1210321 | N/A | N/A | 35490 | 35505 | CCTTAATTATCTTGCC | 60 | 3014 |
| 1210351 | N/A | N/A | 2924 | 2939 | CATTTGCGGCTTGCAG | 94 | 3015 |
| 1210379 | N/A | N/A | 3794 | 3809 | AAGTAGCTTGTAACTC | 84 | 3016 |
| 1210407 | N/A | N/A | 4511 | 4526 | CCAACTGAGACTCCCG | 91 | 3017 |
| 1210435 | N/A | N/A | 4834 | 4849 | CCTCTTGGGTGCGAAT | 96 | 3018 |
| 1210463 | N/A | N/A | 5159 | 5174 | AGTGTTGACCGAGAAA | 145 | 3019 |
| 1210491 | N/A | N/A | 5638 | 5653 | CGCTGCGCTTTCTGGC | 127 | 3020 |
| 1210519 | N/A | N/A | 5900 | 5915 | CAACACTCTCGGGATG | 79 | 3021 |
| 1210547 | N/A | N/A | 6319 | 6334 | GGAGTAGATGTCCAGC | 122 | 3022 |
| 1210575 | N/A | N/A | 6587 | 6602 | GGCTCCGGAGAGGTGG | 139 | 3023 |
| 1210603 | N/A | N/A | 7000 | 7015 | GCAACGGAACATCTTT | 162 | 3024 |
| 1210631 | N/A | N/A | 7569 | 7584 | AATAGAGACCTGCGCA | 89 | 3025 |
| 1210659 | N/A | N/A | 8465 | 8480 | TTGTTTATAGCTCCTA | 31 | 3026 |
| 1210687 | N/A | N/A | 8930 | 8945 | TCTGAGGACAAGCTCA | 87 | 3027 |
| 1210715 | N/A | N/A | 9199 | 9214 | ACCACCTTCACAGCTC | 40 | 3028 |
| 1210763 | N/A | N/A | 9869 | 9884 | ATGAGTAGCTCCAGCA | 46 | 3029 |
| 1210789 | N/A | N/A | 10409 | 10424 | GCCAGACCCTAAAGGG | 108 | 3030 |
| 1210817 | N/A | N/A | 10655 | 10670 | CTTAGCAACTCCTCTG | 84 | 3031 |
| 1210845 | N/A | N/A | 11150 | 11165 | AGGCCCTGGAGGATTC | 111 | 3032 |
| 1210873 | N/A | N/A | 11865 | 11880 | CGGAGTCAAAGTCAGT | 13 | 3033 |
| 1210901 | N/A | N/A | 12254 | 12269 | TCCTCCCCGTTGCCTG | 62 | 3034 |
| 1210929 | N/A | N/A | 12746 | 12761 | AGAGGTATTTGCTGCC | 20 | 3035 |
| 1210957 | N/A | N/A | 13589 | 13604 | GCCTGAGGGACCCGTG | 139 | 3036 |
| 1210985 | N/A | N/A | 14044 | 14059 | CTTAGCACCTGCAATA | 68 | 3037 |
| 1211013 | N/A | N/A | 14482 | 14497 | TCCAACTTGGAATCAA | 65 | 3038 |
| 1211041 | N/A | N/A | 15080 | 15095 | GTGGCTTAATTCCAGT | 112 | 3039 |
| 1211069 | N/A | N/A | 15750 | 15765 | TAAACAAGTCTGGGAT | 43 | 3040 |
| 1211097 | N/A | N/A | 16450 | 16465 | CAGTGGTAGGATGAAC | 38 | 3041 |
| 1211123 | N/A | N/A | 16981 | 16996 | ACCCTTCAATGATGTC | 93 | 3042 |
| 1211150 | N/A | N/A | 17773 | 17788 | CAGCCGAGGTAATTTC | 141 | 3043 |
| 1211178 | N/A | N/A | 18725 | 18740 | ACAGAGGCTCCGGGAC | 123 | 3044 |
| 1211206 | N/A | N/A | 19057 | 19072 | AGTCATGAACTGCATC | 100 | 3045 |
| 1211230 | N/A | N/A | 19307 | 19322 | GAAGACTTACTCCACC | 24 | 3046 |
| 1211257 | N/A | N/A | 19910 | 19925 | GCCCATATGCTTCGCC | 113 | 3047 |
| 1211285 | N/A | N/A | 20482 | 20497 | GTGGGAAGCTCGAGTT | 188 | 3048 |
| 1211313 | N/A | N/A | 21744 | 21759 | CATACGGTCTTCTTAA | 67 | 3049 |
| 1211340 | N/A | N/A | 22639 | 22654 | CAAGGTAAGGGTCCCG | 76 | 3050 |
| 1211367 | N/A | N/A | 23454 | 23469 | GACATTGATTGTAGCA | 24 | 3051 |
| 1211387 | N/A | N/A | 24599 | 24614 | CATATTGCAACTGGAA | 23 | 3052 |
| 1211415 | N/A | N/A | 26049 | 26064 | TCAACCACATTATATG | 71 | 3053 |
| 1211440 | N/A | N/A | 26770 | 26785 | TAATGGGTTGTGAGCC | 26 | 3054 |
| 1211463 | N/A | N/A | 27497 | 27512 | ACGGGATGAAGGCTTA | 52 | 3055 |
| 1211491 | N/A | N/A | 28320 | 28335 | TGCCTCGAGGTGCAGG | 144 | 3056 |
| 1211513 | N/A | N/A | 28776 | 28791 | ACCTTCCTTCCAGATC | 100 | 3057 |
| 1211525 | N/A | N/A | 28952 | 28967 | TGATAACTACTTTGCT | 100 | 3058 |
| 1211553 | N/A | N/A | 29565 | 29580 | GACAACCAACTCAGAG | 31 | 3059 |
| 1211581 | N/A | N/A | 30173 | 30188 | ACAAGGTTTGAGCGAG | 17 | 3060 |
| 1211608 | N/A | N/A | 30821 | 30836 | AAGAGTGGATTAGTAA | 36 | 3061 |
| 1211636 | N/A | N/A | 31319 | 31334 | ACCCTAATCTACTTAG | 136 | 3062 |
| 1211661 | N/A | N/A | 31800 | 31815 | AGAAGAGATAGTTCCT | 42 | 3063 |
| 1211689 | N/A | N/A | 32535 | 32550 | CAGTCTAGTGCAACCC | 35 | 3064 |
| 1211717 | N/A | N/A | 33397 | 33412 | CTGTGATTGAAGCCCA | 13 | 3065 |
| 1211745 | N/A | N/A | 33912 | 33927 | GAGGCCTTTGCATAGC | 138 | 3066 |
| 1211773 | N/A | N/A | 34307 | 34322 | GATGTACCAAGATAAG | 39 | 3067 |
| 1211801 | N/A | N/A | 34699 | 34714 | GACCGGGACTCCCTGG | 102 | 3068 |
| 1211829 | N/A | N/A | 35060 | 35075 | TTAACCGTGATAAGCA | 45 | 3069 |
| 1211857 | N/A | N/A | 35336 | 35351 | GGTGTTAACAGAGTGC | 45 | 3070 |
| 1211885 | N/A | N/A | 35763 | 35778 | GTGGGAATACGCCACA | 78 | 3071 |
| 1211913 | N/A | N/A | 36274 | 36289 | CTGGGAAGCCACGCTG | 148 | 3072 |
| 1211941 | N/A | N/A | 36553 | 36568 | TTGGGTATGGAAACCC | 122 | 3073 |

TABLE 51
Percent control of human PMP22 RNA with 3-10-3 cEt gapmers

| | SEQ | SEQ | SEQ | SEQ | | | |
|---|---|---|---|---|---|---|---|
| | ID | ID | ID | ID | | | |
| | NO: 1 | NO: 1 | NO: 2 | NO: 2 | | PMP22 | SEQ |
| Compound | Start | Stop | Start | Stop | | (% | ID |
| ID | Site | Site | Site | Site | Sequence (5′ to 3′) | UTC) | NO |
| 684267 | 864 | 879 | 37227 | 37242 | ATCTTCAATCAACAGC | 9 | 30 |
| 684394 | 1489 | 1504 | 37852 | 37867 | ATTATTCAGGTCTCCA | 5 | 31 |
| 684394 | 1489 | 1504 | 37852 | 37867 | ATTATTCAGGTCTCCA | 6 | 31 |
| 1076619 | N/A | N/A | 9489 | 9504 | TTCTGGATTAAGGACC | 52 | 3074 |
| 1209872 | N/A | N/A | 4062 | 4077 | ACAAACCTAATCACCC | 120 | 3075 |
| 1209900 | N/A | N/A | 8575 | 8590 | ACTATAGTAGAAGGAG | 75 | 3076 |
| 1209928 | N/A | N/A | 10058 | 10073 | TTTATAATGCTTCAGC | 7 | 3077 |
| 1209956 | N/A | N/A | 12372 | 12387 | TCATTTGAAGATGTTC | 17 | 3078 |
| 1209984 | N/A | N/A | 15734 | 15749 | CGTTTTGAAGACAGCG | 35 | 3079 |
| 1210012 | N/A | N/A | 17221 | 17236 | GGATTAAATGCATTGC | 18 | 3080 |
| 1210040 | N/A | N/A | 19675 | 19690 | TATTTTAGCTAGAGCA | 80 | 3081 |
| 1210068 | N/A | N/A | 22593 | 22608 | AGCATTTATGTGCTCT | 126 | 3082 |
| 1210097 | N/A | N/A | 23700 | 23715 | TAAGTGATAGCTACCT | 29 | 3083 |
| 1210125 | N/A | N/A | 25303 | 25318 | TAGATTACATAAGAGG | 22 | 3084 |
| 1210153 | N/A | N/A | 26702 | 26717 | ATAGAGGTTCTTCTGG | 44 | 3085 |
| 1210181 | N/A | N/A | 27779 | 27794 | GCTTATCAGAACTTCT | 39 | 3086 |
| 1210209 | N/A | N/A | 29769 | 29784 | GTATTGAAATGTTGTA | 4 | 3087 |
| 1210238 | N/A | N/A | 30171 | 30186 | AAGGTTTGAGCGAGGC | 20 | 3088 |
| 1210266 | N/A | N/A | 31610 | 31625 | TCCATAAAGATCACAG | 37 | 3089 |
| 1210294 | N/A | N/A | 33700 | 33715 | AGTAAGTAGCTAACAG | 108 | 3090 |
| 1210322 | N/A | N/A | 35491 | 35506 | TCCTTAATTATCTTGC | 55 | 3091 |
| 1210352 | N/A | N/A | 2927 | 2942 | TTTCATTTGCGGCTTG | 160 | 3092 |
| 1210380 | N/A | N/A | 3819 | 3834 | GGAAGACCTGACCACC | 131 | 3093 |
| 1210408 | N/A | N/A | 4517 | 4532 | GCGCGCCCAACTGAGA | 111 | 3094 |
| 1210436 | N/A | N/A | 4845 | 4860 | TCTAGCGGGCTCCTCT | 185 | 3095 |
| 1210464 | N/A | N/A | 5163 | 5178 | ACCTAGTGTTGACCGA | 90 | 3096 |
| 1210492 | N/A | N/A | 5640 | 5655 | TGCGCTGCGCTTTCTG | 163 | 3097 |
| 1210520 | N/A | N/A | 5902 | 5917 | TCCAACACTCTCGGGA | 86 | 3098 |
| 1210548 | N/A | N/A | 6322 | 6337 | AAGGGAGTAGATGTCC | 113 | 3099 |
| 1210576 | N/A | N/A | 6589 | 6604 | GCGGCTCCGGAGAGGT | 115 | 3100 |
| 1210604 | N/A | N/A | 7007 | 7022 | CCCGCCTGCAACGGAA | 105 | 3101 |
| 1210632 | N/A | N/A | 7577 | 7592 | TTGGCTTAAATAGAGA | 71 | 3102 |
| 1210660 | N/A | N/A | 8488 | 8503 | CCCGCCTCTCTCAGTC | 176 | 3103 |
| 1210688 | N/A | N/A | 9066 | 9081 | GCGAGATCACCACCCC | 89 | 3104 |
| 1210716 | N/A | N/A | 9200 | 9215 | TACCACCTTCACAGCT | 55 | 3105 |
| 1210764 | N/A | N/A | 9871 | 9886 | CTATGAGTAGCTCCAG | 9 | 3106 |
| 1210790 | N/A | N/A | 10421 | 10436 | CCGGGAACTTCAGCCA | 91 | 3107 |
| 1210818 | N/A | N/A | 10663 | 10678 | AAGCACAACTTAGCAA | 48 | 3108 |
| 1210846 | N/A | N/A | 11163 | 11178 | AACTCAATCAAAGAGG | 101 | 3109 |
| 1210874 | N/A | N/A | 11868 | 11883 | AGGCGGAGTCAAAGTC | 69 | 3110 |
| 1210902 | N/A | N/A | 12279 | 12294 | TTACCTTAGGTCACAG | 36 | 3111 |
| 1210930 | N/A | N/A | 12754 | 12769 | GCTTACAGAGAGGTAT | 41 | 3112 |
| 1210958 | N/A | N/A | 13608 | 13623 | GCATTGGAACAATGGG | 58 | 3113 |
| 1210986 | N/A | N/A | 14048 | 14063 | TAACCTTAGCACCTGC | 54 | 3114 |
| 1211014 | N/A | N/A | 14511 | 14526 | CTGCCTTATAGAGGCT | 117 | 3115 |
| 1211042 | N/A | N/A | 15087 | 15102 | GCCGCCTGTGGCTTAA | 125 | 3116 |
| 1211070 | N/A | N/A | 15795 | 15810 | AAATTGTCTGGTGTCC | 30 | 3117 |
| 1211098 | N/A | N/A | 16463 | 16478 | ATAAGTTCCCCATCAG | 51 | 3118 |
| 1211124 | N/A | N/A | 17094 | 17109 | CAAACTCCTCACTGGT | 100 | 3119 |
| 1211151 | N/A | N/A | 18112 | 18127 | CTAGAAGTGAATGGAC | 61 | 3120 |
| 1211179 | N/A | N/A | 18745 | 18760 | CAATTACATCCTGAAC | 82 | 3121 |
| 1211207 | N/A | N/A | 19061 | 19076 | TTGCAGTCATGAACTG | 113 | 3122 |
| 1211231 | N/A | N/A | 19319 | 19334 | GAATTGCTCTTGGAAG | 32 | 3123 |
| 1211258 | N/A | N/A | 19928 | 19943 | CTAAACAATGTGGCCT | 178 | 3124 |
| 1211286 | N/A | N/A | 20484 | 20499 | TAGTGGGAAGCTCGAG | 111 | 3125 |
| 1211314 | N/A | N/A | 21800 | 21815 | CAGATAGCAAACTATC | 78 | 3126 |
| 1211341 | N/A | N/A | 22641 | 22656 | TCCAAGGTAAGGGTCC | 88 | 3127 |
| 1211368 | N/A | N/A | 23458 | 23473 | TAAGGACATTGATTGT | 33 | 3128 |
| 1211388 | N/A | N/A | 24601 | 24616 | TCCATATTGCAACTGG | 80 | 3129 |
| 1211416 | N/A | N/A | 26055 | 26070 | CTATCATCAACCACAT | 65 | 3130 |
| 1211441 | N/A | N/A | 26776 | 26791 | GACGGCTAATGGGTTG | 61 | 3131 |
| 1211464 | N/A | N/A | 27500 | 27515 | CAGACGGGATGAAGGC | 61 | 3132 |
| 1211492 | N/A | N/A | 28360 | 28375 | CACTTGGTTAGGAGAG | 124 | 3133 |
| 1211514 | N/A | N/A | 28778 | 28793 | GGACCTTCCTTCCAGA | 124 | 3134 |
| 1211526 | N/A | N/A | 28963 | 28978 | AGACACATACCTGATA | 30 | 3135 |
| 1211554 | N/A | N/A | 29568 | 29583 | TCTGACAACCAACTCA | 51 | 3136 |
| 1211582 | N/A | N/A | 30237 | 30252 | TAACGAGCCTGTACAA | 42 | 3137 |
| 1211609 | N/A | N/A | 30895 | 30910 | TTCGGAATTCTGCACT | 25 | 3138 |
| 1211637 | N/A | N/A | 31323 | 31338 | AACAACCCTAATCTAC | 94 | 3139 |
| 1211662 | N/A | N/A | 31816 | 31831 | CAACCTAATGCAATCA | 64 | 3140 |
| 1211690 | N/A | N/A | 32614 | 32629 | GGGTGTAAGCAGTAAA | 10 | 3141 |
| 1211718 | N/A | N/A | 33506 | 33521 | ATGAGTGGGTGCCTTT | 50 | 3142 |
| 1211746 | N/A | N/A | 33915 | 33930 | GAGGAGGCCTTTGCAT | 112 | 3143 |
| 1211774 | N/A | N/A | 34311 | 34326 | TCTAGATGTACCAAGA | 90 | 3144 |
| 1211802 | N/A | N/A | 34701 | 34716 | ATGACCGGGACTCCCT | 51 | 3145 |
| 1211830 | N/A | N/A | 35064 | 35079 | AAGCTTAACCGTGATA | 118 | 3146 |
| 1211858 | N/A | N/A | 35381 | 35396 | AAGGCAGGGCTATAAA | 85 | 3147 |
| 1211886 | N/A | N/A | 35766 | 35781 | GAAGTGGGAATACGCC | 16 | 3148 |
| 1211914 | N/A | N/A | 36276 | 36291 | GACTGGGAAGCCACGC | 46 | 3149 |
| 1211942 | N/A | N/A | 36568 | 36583 | TCTTTCCAAGGGTGGT | 93 | 3150 |

TABLE 52
Percent control of human PMP22 RNA with 3-10-3 cEt gapmers

| | SEQ | SEQ | SEQ | SEQ | | | |
|---|---|---|---|---|---|---|---|
| | ID | ID | ID | ID | | | |
| | NO: 1 | NO: 1 | NO: 2 | NO: 2 | | PMP22 | SEQ |
| Compound | Start | Stop | Start | Stop | Sequence | (% | ID |
| ID | Site | Site | Site | Site | (5′ to 3′) | UTC) | NO |
| 684267 | 864 | 879 | 37227 | 37242 | ATCTTCAATCAACAGC | 18 | 30 |
| 684394 | 1489 | 1504 | 37852 | 37867 | ATTATTCAGGTCTCCA | 42 | 31 |
| 684394 | 1489 | 1504 | 37852 | 37867 | ATTATTCAGGTCTCCA | 7 | 31 |
| 1076616 | N/A | N/A | 9492 | 9507 | ATCTTCTGGATTAAGG | 21 | 3151 |
| 1120813 | N/A | N/A | 28795 | 28810 | ACGCCTGGCTTGGGTG | 94 | 3152 |
| 1209873 | N/A | N/A | 4128 | 4143 | CTTTATATGCATGGTC | 39 | 3153 |
| 1209901 | N/A | N/A | 8577 | 8592 | TTACTATAGTAGAAGG | 83 | 3154 |
| 1209929 | N/A | N/A | 10060 | 10075 | GGTTTATAATGCTTCA | 98 | 3155 |
| 1209957 | N/A | N/A | 12388 | 12403 | CTTACTTAAGCCCCTA | 24 | 3156 |
| 1209985 | N/A | N/A | 15754 | 15769 | TTGATAAACAAGTCTG | 35 | 3157 |
| 1210013 | N/A | N/A | 17432 | 17447 | GCAAATCTTCTGTTCC | 109 | 3158 |
| 1210041 | N/A | N/A | 19677 | 19692 | GGTATTTTAGCTAGAG | 61 | 3159 |
| 1210069 | N/A | N/A | 22638 | 22653 | AAGGTAAGGGTCCCGT | 82 | 3160 |
| 1210098 | N/A | N/A | 23721 | 23736 | GGATAATATCAGCAGA | 103 | 3161 |
| 1210126 | N/A | N/A | 25304 | 25319 | ATAGATTACATAAGAG | 50 | 3162 |
| 1210154 | N/A | N/A | 26703 | 26718 | CATAGAGGTTCTTCTG | 96 | 3163 |
| 1210182 | N/A | N/A | 27862 | 27877 | CTTATGTACATGTGTC | 110 | 3164 |
| 1210210 | N/A | N/A | 29770 | 29785 | AGTATTGAAATGTTGT | 109 | 3165 |
| 1210239 | N/A | N/A | 30183 | 30198 | CCAAATCATAACAAGG | 58 | 3166 |
| 1210267 | N/A | N/A | 31612 | 31627 | CATCCATAAAGATCAC | 119 | 3167 |
| 1210295 | N/A | N/A | 33836 | 33851 | CCAAATGCAGGATTCA | 28 | 3168 |
| 1210323 | N/A | N/A | 35804 | 35819 | TTTTACTGGACACTGC | 36 | 3169 |
| 1210353 | N/A | N/A | 2931 | 2946 | TCCTTTTCATTTGCGG | 52 | 3170 |
| 1210381 | N/A | N/A | 3831 | 3846 | TCAACCTTTCAGGGAA | 122 | 3171 |
| 1210409 | N/A | N/A | 4519 | 4534 | AGGCGCGCCCAACTGA | 137 | 3172 |
| 1210437 | N/A | N/A | 4848 | 4863 | TGATCTAGCGGGCTCC | 39 | 3173 |
| 1210465 | N/A | N/A | 5165 | 5180 | AGACCTAGTGTTGACC | 49 | 3174 |
| 1210493 | N/A | N/A | 5643 | 5658 | GCCTGCGCTGCGCTTT | 149 | 3175 |
| 1210521 | N/A | N/A | 5954 | 5969 | GGGTTTGAATTAAGCC | 27 | 3176 |
| 1210549 | N/A | N/A | 6328 | 6343 | GGACCGAAGGGAGTAG | 124 | 3177 |
| 1210577 | N/A | N/A | 6592 | 6607 | CTGGCGGCTCCGGAGA | 106 | 3178 |
| 1210605 | N/A | N/A | 7015 | 7030 | CAGCCGGGCCCGCCTG | 96 | 3179 |
| 1210633 | N/A | N/A | 7587 | 7602 | CTGAAGTTACTTGGCT | 82 | 3180 |
| 1210661 | N/A | N/A | 8507 | 8522 | CTCGGGATCATTCCCC | 88 | 3181 |
| 1210689 | N/A | N/A | 9068 | 9083 | CAGCGAGATCACCACC | 18 | 3182 |
| 1210717 | N/A | N/A | 9201 | 9216 | ATACCACCTTCACAGC | 49 | 3183 |
| 1210765 | N/A | N/A | 9880 | 9895 | ATACTGGATCTATGAG | 15 | 3184 |
| 1210791 | N/A | N/A | 10432 | 10447 | TCCGGAGTGCTCCGGG | 50 | 3185 |
| 1210819 | N/A | N/A | 10665 | 10680 | TTAAGCACAACTTAGC | 24 | 3186 |
| 1210847 | N/A | N/A | 11164 | 11179 | AAACTCAATCAAAGAG | 83 | 3187 |
| 1210875 | N/A | N/A | 11870 | 11885 | GCAGGCGGAGTCAAAG | 80 | 3188 |
| 1210903 | N/A | N/A | 12282 | 12297 | CCCTTACCTTAGGTCA | 107 | 3189 |
| 1210931 | N/A | N/A | 12768 | 12783 | GTATTCCACACCAGGC | 10 | 3190 |
| 1210959 | N/A | N/A | 13611 | 13626 | CAGGCATTGGAACAAT | 94 | 3191 |
| 1210987 | N/A | N/A | 14055 | 14070 | ACTCTTGTAACCTTAG | 82 | 3192 |
| 1211015 | N/A | N/A | 14538 | 14553 | TCTACCTTGTACAATT | 57 | 3193 |
| 1211043 | N/A | N/A | 15092 | 15107 | CCCAAGCCGCCTGTGG | 38 | 3194 |
| 1211071 | N/A | N/A | 15850 | 15865 | CAGAAGGTCTCCCGTG | 75 | 3195 |
| 1211099 | N/A | N/A | 16471 | 16486 | TGAAGGTAATAAGTTC | 60 | 3196 |
| 1211125 | N/A | N/A | 17106 | 17121 | GGACTATGACCACAAA | 1 | 3197 |
| 1211152 | N/A | N/A | 18134 | 18149 | CATCAGGCATGAATGA | 129 | 3198 |
| 1211180 | N/A | N/A | 18757 | 18772 | CCCTCGATGCCACAAT | 82 | 3199 |
| 1211208 | N/A | N/A | 19062 | 19077 | ATTGCAGTCATGAACT | 97 | 3200 |
| 1211232 | N/A | N/A | 19373 | 19388 | CCCTTGTTGGAAAACT | 18 | 3201 |
| 1211259 | N/A | N/A | 20000 | 20015 | GATCGCCATTTTCCTT | 77 | 3202 |
| 1211287 | N/A | N/A | 20486 | 20501 | GATAGTGGGAAGCTCG | 60 | 3203 |
| 1211315 | N/A | N/A | 21836 | 21851 | TAAGGGTGCTACAGAG | 79 | 3204 |
| 1211342 | N/A | N/A | 22651 | 22666 | TTTGATCCTGTCCAAG | 67 | 3205 |
| 1211369 | N/A | N/A | 23506 | 23521 | CTACTATATCCTGGAA | 35 | 3206 |
| 1211389 | N/A | N/A | 24605 | 24620 | CTAATCCATATTGCAA | 75 | 3207 |
| 1211417 | N/A | N/A | 26063 | 26078 | TAGTAAGTCTATCATC | 62 | 3208 |
| 1211442 | N/A | N/A | 26781 | 26796 | AAAATGACGGCTAATG | 96 | 3209 |
| 1211465 | N/A | N/A | 27502 | 27517 | ACCAGACGGGATGAAG | 96 | 3210 |
| 1211493 | N/A | N/A | 28365 | 28380 | AGAGACACTTGGTTAG | 102 | 3211 |
| 1211527 | N/A | N/A | 28974 | 28989 | CTATTGGTGGAAGACA | 44 | 3212 |
| 1211555 | N/A | N/A | 29575 | 29590 | TGGGCATTCTGACAAC | 96 | 3213 |
| 1211583 | N/A | N/A | 30239 | 30254 | AATAACGAGCCTGTAC | 53 | 3214 |
| 1211610 | N/A | N/A | 30897 | 30912 | CATTCGGAATTCTGCA | 19 | 3215 |
| 1211638 | N/A | N/A | 31372 | 31387 | TTAAGTTGTCACTTGC | 58 | 3216 |
| 1211663 | N/A | N/A | 31818 | 31833 | GCCAACCTAATGCAAT | 53 | 3217 |
| 1211691 | N/A | N/A | 32617 | 32632 | GCTGGGTGTAAGCAGT | 61 | 3218 |
| 1211719 | N/A | N/A | 33523 | 33538 | GCTATGATGTTGGGTT | 100 | 3219 |
| 1211747 | N/A | N/A | 34009 | 34024 | CATGATCAGACGCACG | 43 | 3220 |
| 1211775 | N/A | N/A | 34313 | 34328 | GCTCTAGATGTACCAA | 40 | 3221 |
| 1211803 | N/A | N/A | 34703 | 34718 | CAATGACCGGGACTCC | 7 | 3222 |
| 1211831 | N/A | N/A | 35067 | 35082 | TCTAAGCTTAACCGTG | 174 | 3223 |
| 1211859 | N/A | N/A | 35396 | 35411 | CTGACTTATCTAATGA | 65 | 3224 |
| 1211887 | N/A | N/A | 35841 | 35856 | CCACCTACATCTAACC | 157 | 3225 |
| 1211915 | N/A | N/A | 36289 | 36304 | CAGCCGACAGTATGAC | 90 | 3226 |
| 1211943 | N/A | N/A | 36617 | 36632 | ACACTACATGGCCAGC | 124 | 3227 |

TABLE 53
Percent control of human PMP22 RNA with 3-10-3 cEt gapmers

| | SEQ | SEQ | SEQ | SEQ | | | |
|---|---|---|---|---|---|---|---|
| | ID | ID | ID | ID | | | |
| | NO: 1 | NO: 1 | NO: 2 | NO: 2 | | PMP22 | SEQ |
| Compound | Start | Stop | Start | Stop | Sequence | (% | ID |
| ID | Site | Site | Site | Site | (5′ to 3′) | UTC) | NO |
| 684267 | 864 | 879 | 37227 | 37242 | ATCTTCAATCAACAGC | 16 | 30 |
| 684394 | 1489 | 1504 | 37852 | 37867 | ATTATTCAGGTCTCCA | 15 | 31 |
| 684394 | 1489 | 1504 | 37852 | 37867 | ATTATTCAGGTCTCCA | 24 | 31 |
| 1076615 | N/A | N/A | 9493 | 9508 | GATCTTCTGGATTAAG | 77 | 3228 |
| 1120812 | N/A | N/A | 28796 | 28811 | TACGCCTGGCTTGGGT | 83 | 3229 |
| 1209874 | N/A | N/A | 4155 | 4170 | CGTTATATGCCAAGCA | 115 | 3230 |
| 1209902 | N/A | N/A | 8578 | 8593 | TTTACTATAGTAGAAG | 121 | 3231 |
| 1209930 | N/A | N/A | 10061 | 10076 | TGGTTTATAATGCTTC | 2 | 3232 |
| 1209958 | N/A | N/A | 12770 | 12785 | AAGTATTCCACACCAG | 32 | 3233 |
| 1209986 | N/A | N/A | 15777 | 15792 | GCCAAAATGACAGTGT | 203 | 3234 |
| 1210014 | N/A | N/A | 17581 | 17596 | AACATTGAATACCCTT | 21 | 3235 |
| 1210042 | N/A | N/A | 19727 | 19742 | CAAAGGCGATGAAGGT | 54 | 3236 |
| 1210070 | N/A | N/A | 23026 | 23041 | TAAGAGTCAGGATTCC | 62 | 3237 |
| 1210099 | N/A | N/A | 23723 | 23738 | ATGGATAATATCAGCA | 30 | 3238 |
| 1210127 | N/A | N/A | 26041 | 26056 | ATTATATGTGAATGGG | 33 | 3239 |
| 1210155 | N/A | N/A | 26737 | 26752 | ACATAACCTTAATCAA | 76 | 3240 |
| 1210183 | N/A | N/A | 27866 | 27881 | GTTACTTATGTACATG | 74 | 3241 |
| 1210211 | N/A | N/A | 29771 | 29786 | GAGTATTGAAATGTTG | 31 | 3242 |
| 1210240 | N/A | N/A | 30246 | 30261 | TCAGTAAAATAACGAG | 82 | 3243 |
| 1210268 | N/A | N/A | 31613 | 31628 | CCATCCATAAAGATCA | 56 | 3244 |
| 1210296 | N/A | N/A | 33995 | 34010 | CGTTTTAGAATGATCA | 70 | 3245 |
| 1210324 | N/A | N/A | 35920 | 35935 | CTATTATAAATCCAGT | 74 | 3246 |
| 1210354 | N/A | N/A | 3021 | 3036 | CAGAGTATATATCCAC | 49 | 3247 |
| 1210382 | N/A | N/A | 3873 | 3888 | CAAATTGCCACCACTA | 128 | 3248 |
| 1210410 | N/A | N/A | 4521 | 4536 | AGAGGCGCGCCCAACT | 111 | 3249 |
| 1210438 | N/A | N/A | 4852 | 4867 | GGATTGATCTAGCGGG | 87 | 3250 |
| 1210466 | N/A | N/A | 5169 | 5184 | GTGGAGACCTAGTGTT | 125 | 3251 |
| 1210494 | N/A | N/A | 5646 | 5661 | CGCGCCTGCGCTGCGC | 130 | 3252 |
| 1210522 | N/A | N/A | 5957 | 5972 | AGAGGGTTTGAATTAA | 89 | 3253 |
| 1210550 | N/A | N/A | 6331 | 6346 | CCTGGACCGAAGGGAG | 118 | 3254 |
| 1210578 | N/A | N/A | 6595 | 6610 | ACTCTGGCGGCTCCGG | 113 | 3255 |
| 1210606 | N/A | N/A | 7050 | 7065 | GCCGCCTGCAGGACCA | 123 | 3256 |
| 1210634 | N/A | N/A | 7594 | 7609 | ATCGGCTCTGAAGTTA | 52 | 3257 |
| 1210662 | N/A | N/A | 8510 | 8525 | CATCTCGGGATCATTC | 88 | 3258 |
| 1210690 | N/A | N/A | 9070 | 9085 | CCCAGCGAGATCACCA | 81 | 3259 |
| 1210718 | N/A | N/A | 9202 | 9217 | CATACCACCTTCACAG | 64 | 3260 |
| 1210766 | N/A | N/A | 9883 | 9898 | TATATACTGGATCTAT | 102 | 3261 |
| 1210792 | N/A | N/A | 10435 | 10450 | CCATCCGGAGTGCTCC | 150 | 3262 |
| 1210820 | N/A | N/A | 10669 | 10684 | TGGTTTAAGCACAACT | 61 | 3263 |
| 1210848 | N/A | N/A | 11166 | 11181 | TTAAACTCAATCAAAG | 119 | 3264 |
| 1210876 | N/A | N/A | 11873 | 11888 | AAGGCAGGCGGAGTCA | 121 | 3265 |
| 1210904 | N/A | N/A | 12285 | 12300 | CTACCCTTACCTTAGG | 112 | 3266 |
| 1210932 | N/A | N/A | 12814 | 12829 | AGAGTATGATTGGGTA | 12 | 3267 |
| 1210960 | N/A | N/A | 13618 | 13633 | TGGGCAACAGGCATTG | 141 | 3268 |
| 1210988 | N/A | N/A | 14071 | 14086 | ACATAAGCTCTTGTTC | 54 | 3269 |
| 1211016 | N/A | N/A | 14551 | 14566 | ATACCGATGCATTTCT | 45 | 3270 |
| 1211044 | N/A | N/A | 15096 | 15111 | GGCTCCCAAGCCGCCT | 103 | 3271 |
| 1211072 | N/A | N/A | 15852 | 15867 | TGCAGAAGGTCTCCCG | 71 | 3272 |
| 1211100 | N/A | N/A | 16517 | 16532 | TGAATGGATCTCACTA | 62 | 3273 |
| 1211126 | N/A | N/A | 17112 | 17127 | CAGTCTGGACTATGAC | 87 | 3274 |
| 1211153 | N/A | N/A | 18166 | 18181 | GCCAAGCAACTTGATA | 90 | 3275 |
| 1211181 | N/A | N/A | 18760 | 18775 | GATCCCTCGATGCCAC | 104 | 3276 |
| 1211209 | N/A | N/A | 19064 | 19079 | CAATTGCAGTCATGAA | 121 | 3277 |
| 1211233 | N/A | N/A | 19377 | 19392 | TATACCCTTGTTGGAA | 123 | 3278 |
| 1211260 | N/A | N/A | 20002 | 20017 | CAGATCGCCATTTTCC | 75 | 3279 |
| 1211288 | N/A | N/A | 20497 | 20512 | CTCCCCCAGCAGATAG | 106 | 3280 |
| 1211316 | N/A | N/A | 21839 | 21854 | GCATAAGGGTGCTACA | 102 | 3281 |
| 1211343 | N/A | N/A | 22654 | 22669 | GGCTTTGATCCTGTCC | 119 | 3282 |
| 1211370 | N/A | N/A | 23509 | 23524 | TATCTACTATATCCTG | 39 | 3283 |
| 1211390 | N/A | N/A | 24608 | 24623 | GTCCTAATCCATATTG | 118 | 3284 |
| 1211418 | N/A | N/A | 26104 | 26119 | TTTCAACCATAAGCAC | 81 | 3285 |
| 1211443 | N/A | N/A | 26840 | 26855 | CATTCAAGCACAACAT | 92 | 3286 |
| 1211466 | N/A | N/A | 27506 | 27521 | AACCACCAGACGGGAT | 94 | 3287 |
| 1211494 | N/A | N/A | 28521 | 28536 | ACTTACCAGCAAGAAT | 115 | 3288 |
| 1211528 | N/A | N/A | 28978 | 28993 | CTACCTATTGGTGGAA | 109 | 3289 |
| 1211556 | N/A | N/A | 29583 | 29598 | TGGTACCATGGGCATT | 97 | 3290 |
| 1211584 | N/A | N/A | 30269 | 30284 | CTCTGGTGGGCTCAAA | 38 | 3291 |
| 1211611 | N/A | N/A | 30903 | 30918 | CTTTTACATTCGGAAT | 66 | 3292 |
| 1211639 | N/A | N/A | 31376 | 31391 | GATGTTAAGTTGTCAC | 38 | 3293 |
| 1211664 | N/A | N/A | 31905 | 31920 | AAAGGACCTCAGGTGA | 100 | 3294 |
| 1211692 | N/A | N/A | 32645 | 32660 | CCTCTATGTGCCCCAC | 93 | 3295 |
| 1211720 | N/A | N/A | 33533 | 33548 | GGAAGGTGCAGCTATG | 91 | 3296 |
| 1211748 | N/A | N/A | 34064 | 34079 | CATGTTAAGGAAGCTG | 106 | 3297 |
| 1211776 | N/A | N/A | 34337 | 34352 | CATGCGGGCCCTGTTC | 137 | 3298 |
| 1211804 | N/A | N/A | 34707 | 34722 | TTGGCAATGACCGGGA | 90 | 3299 |
| 1211832 | N/A | N/A | 35070 | 35085 | GACTCTAAGCTTAACC | 27 | 3300 |
| 1211860 | N/A | N/A | 35420 | 35435 | CTGAAGTTGTCTCTTG | 40 | 3301 |
| 1211888 | N/A | N/A | 35846 | 35861 | CCCGGCCACCTACATC | 138 | 3302 |
| 1211916 | N/A | N/A | 36292 | 36307 | ATGCAGCCGACAGTAT | 106 | 3303 |
| 1211944 | N/A | N/A | 36690 | 36705 | CTTAATACCTGAGGGT | 85 | 3304 |

TABLE 54
Percent control of human PMP22 RNA with 3-10-3 cEt gapmers

| | SEQ | SEQ | SEQ | SEQ | | | |
|---|---|---|---|---|---|---|---|
| | ID | ID | ID | ID | | | |
| | NO: 1 | NO: 1 | NO: 2 | NO: 2 | | PMP22 | SEQ |
| Compound | Start | Stop | Start | Stop | Sequence | (% | ID |
| ID | Site | Site | Site | Site | (5′ to 3′) | UTC) | NO |
| 684267 | 864 | 879 | 37227 | 37242 | ATCTTCAATCAACAGC | 12 | 30 |
| 684394 | 1489 | 1504 | 37852 | 37867 | ATTATTCAGGTCTCCA | 96 | 31 |
| 684394 | 1489 | 1504 | 37852 | 37867 | ATTATTCAGGTCTCCA | 16 | 31 |
| 1076614 | N/A | N/A | 9494 | 9509 | CGATCTTCTGGATTAA | 69 | 3305 |
| 1120811 | N/A | N/A | 28797 | 28812 | ATACGCCTGGCTTGGG | 113 | 3306 |
| 1209875 | N/A | N/A | 4157 | 4172 | CCCGTTATATGCCAAG | 160 | 3307 |
| 1209903 | N/A | N/A | 8581 | 8596 | ATGTTTACTATAGTAG | 143 | 3308 |
| 1209931 | N/A | N/A | 10087 | 10102 | CTATTTGTACTGTGGT | 132 | 3309 |
| 1209959 | N/A | N/A | 12866 | 12881 | GAAATAACTGGGACTT | 69 | 3310 |
| 1209987 | N/A | N/A | 15796 | 15811 | GAAATTGTCTGGTGTC | 59 | 3311 |
| 1210015 | N/A | N/A | 17604 | 17619 | CAAGTAACTGTATTCA | 39 | 3312 |
| 1210043 | N/A | N/A | 19753 | 19768 | ACAACTATGTGCCAGC | 50 | 3313 |
| 1210071 | N/A | N/A | 23033 | 23048 | GACTTACTAAGAGTCA | 156 | 3314 |
| 1210100 | N/A | N/A | 23724 | 23739 | AATGGATAATATCAGC | 77 | 3315 |
| 1210128 | N/A | N/A | 26065 | 26080 | GATAGTAAGTCTATCA | 26 | 3316 |
| 1210156 | N/A | N/A | 26738 | 26753 | TACATAACCTTAATCA | 54 | 3317 |
| 1210184 | 536 | 551 | 28509 | 28524 | GAATTTGGAAGATTCC | 82* | 3318 |
| 1210212 | N/A | N/A | 29777 | 29792 | AACCATGAGTATTGAA | 41 | 3319 |
| 1210241 | N/A | N/A | 30260 | 30275 | GCTCAAATTATTCATC | 92 | 3320 |
| 1210269 | N/A | N/A | 31628 | 31643 | GAAAGCTGATGTGTGC | 58 | 3321 |
| 1210297 | N/A | N/A | 34216 | 34231 | GGAATTTCGAGAGAGG | 71 | 3322 |
| 1210325 | N/A | N/A | 36173 | 36188 | CTGGATATGCAGGTGG | 72 | 3323 |
| 1210355 | N/A | N/A | 3023 | 3038 | GCCAGAGTATATATCC | 95 | 3324 |
| 1210383 | N/A | N/A | 3889 | 3904 | ATAAGGGCCCAGTGCC | 8 | 3325 |
| 1210411 | N/A | N/A | 4532 | 4547 | CTCGGCTTGGCAGAGG | 60 | 3326 |
| 1210439 | N/A | N/A | 4870 | 4885 | GCTTCCTAGGATTGGC | 120 | 3327 |
| 1210467 | N/A | N/A | 5173 | 5188 | CCCCGTGGAGACCTAG | 39 | 3328 |
| 1210495 | N/A | N/A | 5651 | 5666 | AGCCCCGCGCCTGCGC | 105 | 3329 |
| 1210523 | N/A | N/A | 6059 | 6074 | AGTACCCAATCCCAGG | 114 | 3330 |
| 1210551 | N/A | N/A | 6333 | 6348 | AGCCTGGACCGAAGGG | 93 | 3331 |
| 1210579 | N/A | N/A | 6602 | 6617 | CGCGCAGACTCTGGCG | 44 | 3332 |
| 1210607 | N/A | N/A | 7077 | 7092 | GCCGCCTGCCGCCGAG | 69 | 3333 |
| 1210635 | N/A | N/A | 7596 | 7611 | AGATCGGCTCTGAAGT | 134 | 3334 |
| 1210663 | N/A | N/A | 8535 | 8550 | GCATTCAAGCCTTCTC | 117 | 3335 |
| 1210691 | N/A | N/A | 9105 | 9120 | GAGTGAATCACAATGA | 81 | 3336 |
| 1210719 | N/A | N/A | 9204 | 9219 | ATCATACCACCTTCAC | 152 | 3337 |
| 1210767 | N/A | N/A | 9900 | 9915 | GTGTAGCATCTTGAAC | 35 | 3338 |
| 1210793 | N/A | N/A | 10440 | 10455 | GACTCCCATCCGGAGT | 123 | 3339 |
| 1210821 | N/A | N/A | 10737 | 10752 | AACGGCAGAAGACACC | 101 | 3340 |
| 1210849 | N/A | N/A | 11178 | 11193 | CAGCCACAATTGTTAA | 77 | 3341 |
| 1210877 | N/A | N/A | 11933 | 11948 | CACACGAGGCAGATAA | 45 | 3342 |
| 1210905 | N/A | N/A | 12287 | 12302 | TTCTACCCTTACCTTA | 119 | 3343 |
| 1210933 | N/A | N/A | 12830 | 12845 | ACTGAGCTATTGCAAA | 95 | 3344 |
| 1210961 | N/A | N/A | 13649 | 13664 | CTGACAAACGAGGAAG | 120 | 3345 |
| 1210989 | N/A | N/A | 14090 | 14105 | GACTGGTTTGTCCAGT | 140 | 3346 |
| 1211017 | N/A | N/A | 14580 | 14595 | TCCCGTCACCCAAAAT | 67 | 3347 |
| 1211045 | N/A | N/A | 15109 | 15124 | CTTCTAGCTCTTGGGC | 21 | 3348 |
| 1211073 | N/A | N/A | 15897 | 15912 | GAGGGAGCCACGAAGA | 43 | 3349 |
| 1211101 | N/A | N/A | 16538 | 16553 | TCAATAGAGTTGAAGA | 91 | 3350 |
| 1211127 | N/A | N/A | 17256 | 17271 | GCTAAGCCACCAGCTA | 98 | 3351 |
| 1211154 | N/A | N/A | 18260 | 18275 | CTGTTTGAAGAGTCAT | 24 | 3352 |
| 1211182 | N/A | N/A | 18763 | 18778 | TAGGATCCCTCGATGC | 67 | 3353 |
| 1211210 | N/A | N/A | 19068 | 19083 | GTTGCAATTGCAGTCA | 61 | 3354 |
| 1211234 | N/A | N/A | 19412 | 19427 | GTTACTGGATAATAGT | 32 | 3355 |
| 1211261 | N/A | N/A | 20004 | 20019 | CACAGATCGCCATTTT | 62 | 3356 |
| 1211289 | N/A | N/A | 20503 | 20518 | ACCTAGCTCCCCCAGC | 120 | 3357 |
| 1211317 | N/A | N/A | 21842 | 21857 | CCAGCATAAGGGTGCT | 93 | 3358 |
| 1211344 | N/A | N/A | 22659 | 22674 | GACAGGGCTTTGATCC | 3 | 3359 |
| 1211371 | N/A | N/A | 23553 | 23568 | TTGTAACACCTCTAGC | 88 | 3360 |
| 1211391 | N/A | N/A | 24610 | 24625 | CTGTCCTAATCCATAT | 70 | 3361 |
| 1211419 | N/A | N/A | 26133 | 26148 | TCTGATGATCCAGAGA | 109 | 3362 |
| 1211444 | N/A | N/A | 26857 | 26872 | TAGTCTAGCACTCTTC | 47 | 3363 |
| 1211467 | N/A | N/A | 27509 | 27524 | GCCAACCACCAGACGG | 70 | 3364 |
| 1211495 | N/A | N/A | 28523 | 28538 | CAACTTACCAGCAAGA | 39* | 3365 |
| 1211529 | N/A | N/A | 28981 | 28996 | TCACTACCTATTGGTG | 143 | 3366 |
| 1211557 | N/A | N/A | 29587 | 29602 | GAAATGGTACCATGGG | 58 | 3367 |
| 1211585 | N/A | N/A | 30274 | 30289 | TTATCCTCTGGTGGGC | 83 | 3368 |
| 1211612 | N/A | N/A | 30907 | 30922 | TGCGCTTTTACATTCG | 86 | 3369 |
| 1211640 | N/A | N/A | 31381 | 31396 | TCCTTGATGTTAAGTT | 57 | 3370 |
| 1211665 | N/A | N/A | 31932 | 31947 | CCCGCCCACTGTCTTT | 100 | 3371 |
| 1211693 | N/A | N/A | 32673 | 32688 | TCCAACCAATAATAGT | 119 | 3372 |
| 1211721 | N/A | N/A | 33569 | 33584 | GAAAGGGATGTCAGTG | 55 | 3373 |
| 1211749 | N/A | N/A | 34075 | 34090 | GCCTTACATGACATGT | 34 | 3374 |
| 1211777 | N/A | N/A | 34344 | 34359 | CCTATTGCATGCGGGC | 48 | 3375 |
| 1211805 | N/A | N/A | 34710 | 34725 | TCTTTGGCAATGACCG | 65 | 3376 |
| 1211833 | N/A | N/A | 35076 | 35091 | GTGAATGACTCTAAGC | 108 | 3377 |
| 1211861 | N/A | N/A | 35422 | 35437 | TACTGAAGTTGTCTCT | 14 | 3378 |
| 1211889 | N/A | N/A | 35848 | 35863 | CGCCCGGCCACCTACA | 26 | 3379 |
| 1211917 | N/A | N/A | 36297 | 36312 | TAAGGATGCAGCCGAC | 133 | 3380 |
| 1211945 | N/A | N/A | 36692 | 36707 | GCCTTAATACCTGAGG | 77 | 3381 |

TABLE 55
Percent control of human PMP22 RNA with 3-10-3 cEt gapmers

| | SEQ | SEQ | SEQ | SEQ | | | |
|---|---|---|---|---|---|---|---|
| | ID | ID | ID | ID | | | |
| | NO: 1 | NO: 1 | NO: 2 | NO: 2 | | PMP22 | SEQ |
| Compound | Start | Stop | Start | Stop | Sequence | (% | ID |
| ID | Site | Site | Site | Site | (5′ to 3′) | UTC) | NO |
| 684267 | 864 | 879 | 37227 | 37242 | ATCTTCAATCAACAGC | 30 | 30 |
| 684394 | 1489 | 1504 | 37852 | 37867 | ATTATTCAGGTCTCCA | 19 | 31 |
| 684394 | 1489 | 1504 | 37852 | 37867 | ATTATTCAGGTCTCCA | 11 | 31 |
| 1076613 | N/A | N/A | 9495 | 9510 | ACGATCTTCTGGATTA | 47 | 3382 |
| 1120810 | N/A | N/A | 28798 | 28813 | GATACGCCTGGCTTGG | 48 | 3383 |
| 1205181 | N/A | N/A | 22680 | 22695 | GATATCACACACTCCA | 173 | 3384 |
| 1209876 | N/A | N/A | 4159 | 4174 | TGCCCGTTATATGCCA | 169 | 3385 |
| 1209904 | N/A | N/A | 8582 | 8597 | GATGTTTACTATAGTA | 58 | 3386 |
| 1209932 | N/A | N/A | 10213 | 10228 | CTCCAATAGGACTGGG | 98 | 3387 |
| 1209960 | N/A | N/A | 13010 | 13025 | CTTACTTATACCTGGA | 40 | 3388 |
| 1209988 | N/A | N/A | 15800 | 15815 | CAAGGAAATTGTCTGG | 49 | 3389 |
| 1210016 | N/A | N/A | 18620 | 18635 | CCTAATTTGTTACAGG | 148 | 3390 |
| 1210044 | N/A | N/A | 19959 | 19974 | GAAATAGCTGAGTCTC | 56 | 3391 |
| 1210072 | N/A | N/A | 23159 | 23174 | AAGAAGAGTTTGGTCA | 54 | 3392 |
| 1210101 | N/A | N/A | 23746 | 23761 | CCAATAGGCAAAATTC | 83 | 3393 |
| 1210129 | N/A | N/A | 26067 | 26082 | AAGATAGTAAGTCTAT | 118 | 3394 |
| 1210157 | N/A | N/A | 26779 | 26794 | AATGACGGCTAATGGG | 97 | 3395 |
| 1210185 | N/A | N/A | 28582 | 28597 | TAAACTAATCATTCCG | 58 | 3396 |
| 1210214 | N/A | N/A | 29807 | 29822 | GCAAAGCACTGTCTGG | 32 | 3397 |
| 1210242 | N/A | N/A | 30324 | 30339 | TGTAACACTCAACCGT | 61 | 3398 |
| 1210270 | N/A | N/A | 31679 | 31694 | CAAACCTACAGTCAGC | 115 | 3399 |
| 1210298 | N/A | N/A | 34222 | 34237 | TTCGATGGAATTTCGA | 92 | 3400 |
| 1210326 | N/A | N/A | 36438 | 36453 | AAAGGATTAAGCTCCA | 95 | 3401 |
| 1210356 | N/A | N/A | 3047 | 3062 | CTCAGATGGCCCCCCA | 208 | 3402 |
| 1210384 | N/A | N/A | 3957 | 3972 | TAAAGGTTTATGGTGG | 142 | 3403 |
| 1210412 | N/A | N/A | 4534 | 4549 | GTCTCGGCTTGGCAGA | 133 | 3404 |
| 1210440 | N/A | N/A | 4886 | 4901 | CCTACGAAGCATGCCA | 148 | 3405 |
| 1210468 | N/A | N/A | 5177 | 5192 | CTGGCCCCGTGGAGAC | 120 | 3406 |
| 1210496 | N/A | N/A | 5655 | 5670 | CCAAAGCCCCGCGCCT | 118 | 3407 |
| 1210524 | N/A | N/A | 6062 | 6077 | GAAAGTACCCAATCCC | 131 | 3408 |
| 1210552 | N/A | N/A | 6337 | 6352 | CAGGAGCCTGGACCGA | 121 | 3409 |
| 1210580 | N/A | N/A | 6605 | 6620 | CCTCGCGCAGACTCTG | 126 | 3410 |
| 1210608 | N/A | N/A | 7081 | 7096 | TCGCGCCGCCTGCCGC | 140 | 3411 |
| 1210636 | N/A | N/A | 7603 | 7618 | GGACCCTAGATCGGCT | 151 | 3412 |
| 1210664 | N/A | N/A | 8547 | 8562 | CCTTAGACACCTGCAT | 108 | 3413 |
| 1210692 | N/A | N/A | 9107 | 9122 | TAGAGTGAATCACAAT | 40 | 3414 |
| 1210720 | N/A | N/A | 9209 | 9224 | TAGCTATCATACCACC | 128 | 3415 |
| 1210768 | N/A | N/A | 9926 | 9941 | GGATCTAAACTGGTTT | 124 | 3416 |
| 1210794 | N/A | N/A | 10443 | 10458 | GGAGACTCCCATCCGG | 163 | 3417 |
| 1210822 | N/A | N/A | 10744 | 10759 | TATTTCCAACGGCAGA | 84 | 3418 |
| 1210850 | N/A | N/A | 11179 | 11194 | GCAGCCACAATTGTTA | 116 | 3419 |
| 1210878 | N/A | N/A | 11955 | 11970 | CTAAGCCTCTCTTACC | 164 | 3420 |
| 1210906 | N/A | N/A | 12322 | 12337 | CACTAGCCAACCAGTC | 114 | 3421 |
| 1210934 | N/A | N/A | 12841 | 12856 | CATAGGGCCCAACTGA | 143 | 3422 |
| 1210962 | N/A | N/A | 13683 | 13698 | CAGGCAAACTAGTTAG | 89 | 3423 |
| 1210990 | N/A | N/A | 14097 | 14112 | GTTTACTGACTGGTTT | 33 | 3424 |
| 1211018 | N/A | N/A | 14586 | 14601 | TAAGAATCCCGTCACC | 133 | 3425 |
| 1211046 | N/A | N/A | 15111 | 15126 | CCCTTCTAGCTCTTGG | 150 | 3426 |
| 1211074 | N/A | N/A | 15899 | 15914 | CTGAGGGAGCCACGAA | 112 | 3427 |
| 1211102 | N/A | N/A | 16543 | 16558 | CAGGCTCAATAGAGTT | 88 | 3428 |
| 1211128 | N/A | N/A | 17258 | 17273 | TAGCTAAGCCACCAGC | 111 | 3429 |
| 1211155 | N/A | N/A | 18342 | 18357 | GAAGAGGCCCTGCTTA | 128 | 3430 |
| 1211183 | N/A | N/A | 18765 | 18780 | TTTAGGATCCCTCGAT | 130 | 3431 |
| 1211211 | N/A | N/A | 19069 | 19084 | AGTTGCAATTGCAGTC | 45 | 3432 |
| 1211235 | N/A | N/A | 19417 | 19432 | CTGAGGTTACTGGATA | 22 | 3433 |
| 1211262 | N/A | N/A | 20021 | 20036 | CCAACCCACAACCATC | 109 | 3434 |
| 1211290 | N/A | N/A | 20530 | 20545 | TCTGACATGGGCCGTG | 97 | 3435 |
| 1211318 | N/A | N/A | 21863 | 21878 | GTATCAATTCATATCT | 89 | 3436 |
| 1211372 | N/A | N/A | 23693 | 23708 | TAGCTACCTGCAGACA | 161 | 3437 |
| 1211392 | N/A | N/A | 24745 | 24760 | GATACATCAACAAGTT | 71 | 3438 |
| 1211420 | N/A | N/A | 26210 | 26225 | TTAGAGGATCAAGGAC | 46 | 3439 |
| 1211445 | N/A | N/A | 26859 | 26874 | TCTAGTCTAGCACTCT | 84 | 3440 |
| 1211468 | N/A | N/A | 27512 | 27527 | ATCGCCAACCACCAGA | 58 | 3441 |
| 1211496 | N/A | N/A | 28535 | 28550 | CTTTACCATCCACAAC | 136 | 3442 |
| 1211530 | N/A | N/A | 29039 | 29054 | CCCAGTAGAATCTAGG | 164 | 3443 |
| 1211558 | N/A | N/A | 29591 | 29606 | TGGTGAAATGGTACCA | 114 | 3444 |
| 1211586 | N/A | N/A | 30276 | 30291 | ATTTATCCTCTGGTGG | 55 | 3445 |
| 1211613 | N/A | N/A | 30915 | 30930 | CAAAGTCATGCGCTTT | 114 | 3446 |
| 1211641 | N/A | N/A | 31386 | 31401 | CTACTTCCTTGATGTT | 116 | 3447 |
| 1211666 | N/A | N/A | 31935 | 31950 | CGCCCCGCCCACTGTC | 120 | 3448 |
| 1211694 | N/A | N/A | 32711 | 32726 | GAGTTTGATTCTGCCG | 70* | 3449 |
| 1211722 | N/A | N/A | 33627 | 33642 | CCTCGCAAAAGCACTT | 108 | 3450 |
| 1211750 | N/A | N/A | 34078 | 34093 | AGGGCCTTACATGACA | 163 | 3451 |
| 1211778 | N/A | N/A | 34346 | 34361 | TGCCTATTGCATGCGG | 118 | 3452 |
| 1211806 | N/A | N/A | 34712 | 34727 | GCTCTTTGGCAATGAC | 76 | 3453 |
| 1211834 | N/A | N/A | 35118 | 35133 | CAGCTTAATGTGTATG | 69 | 3454 |
| 1211862 | N/A | N/A | 35424 | 35439 | AATACTGAAGTTGTCT | 63 | 3455 |
| 1211890 | N/A | N/A | 35851 | 35866 | CACCGCCCGGCCACCT | 147 | 3456 |
| 1211918 | N/A | N/A | 36356 | 36371 | CTATGGGCACTGCCAA | 110 | 3457 |
| 1211946 | N/A | N/A | 36694 | 36709 | AGGCCTTAATACCTGA | 140 | 3458 |

TABLE 56
Percent control of human PMP22 RNA with 3-10-3 cEt gapmers

| | SEQ | SEQ | SEQ | SEQ | | | |
|---|---|---|---|---|---|---|---|
| | ID | ID | ID | ID | | | |
| | NO: 1 | NO: 1 | NO: 2 | NO: 2 | | PMP22 | SEQ |
| Compound | Start | Stop | Start | Stop | Sequence | (% | ID |
| ID | Site | Site | Site | Site | (5′ to 3′) | UTC) | NO |
| 684267 | 864 | 879 | 37227 | 37242 | ATCTTCAATCAACAGC | 10 | 30 |
| 684394 | 1489 | 1504 | 37852 | 37867 | ATTATTCAGGTCTCCA | 9 | 31 |
| 684394 | 1489 | 1504 | 37852 | 37867 | ATTATTCAGGTCTCCA | 7 | 31 |
| 1076612 | N/A | N/A | 9496 | 9511 | TACGATCTTCTGGATT | 54 | 3459 |
| 1079057 | N/A | N/A | 19073 | 19088 | AGGCAGTTGCAATTGC | 128 | 3460 |
| 1205267 | N/A | N/A | 28800 | 28815 | TTGATACGCCTGGCTT | 26 | 3461 |
| 1209877 | N/A | N/A | 4168 | 4183 | CATTTACAGTGCCCGT | 109 | 3462 |
| 1209905 | N/A | N/A | 8601 | 8616 | AGAAACGATTATGTGC | 77 | 3463 |
| 1209933 | N/A | N/A | 10214 | 10229 | ACTCCAATAGGACTGG | 62 | 3464 |
| 1209961 | N/A | N/A | 13767 | 13782 | AGTGATATAATTAGGT | 15 | 3465 |
| 1209989 | N/A | N/A | 15831 | 15846 | TCTAAAATCTGGCCAA | 60 | 3466 |
| 1210017 | N/A | N/A | 18622 | 18637 | TACCTAATTTGTTACA | 111 | 3467 |
| 1210045 | N/A | N/A | 20104 | 20119 | TTATTAACACCTCCCA | 67 | 3468 |
| 1210073 | N/A | N/A | 23160 | 23175 | GAAGAAGAGTTTGGTC | 29 | 3469 |
| 1210102 | N/A | N/A | 23763 | 23778 | CACCAATTTTCATCCA | 35 | 3470 |
| 1210130 | N/A | N/A | 26069 | 26084 | TTAAGATAGTAAGTCT | 72 | 3471 |
| 1210158 | N/A | N/A | 26787 | 26802 | AGTAAGAAAATGACGG | 93 | 3472 |
| 1210186 | N/A | N/A | 28584 | 28599 | ACTAAACTAATCATTC | 94 | 3473 |
| 1210215 | N/A | N/A | 29811 | 29826 | AGTAGCAAAGCACTGT | 76 | 3474 |
| 1210243 | N/A | N/A | 30347 | 30362 | AAGAAGTACCTCACTA | 104 | 3475 |
| 1210271 | N/A | N/A | 31709 | 31724 | GTAATCTAGAGCAAGG | 36 | 3476 |
| 1210299 | N/A | N/A | 34223 | 34238 | GTTCGATGGAATTTCG | 19 | 3477 |
| 1210327 | N/A | N/A | 36461 | 36476 | ATTATTGGAGTCACGC | 30 | 3478 |
| 1210357 | N/A | N/A | 3102 | 3117 | GCATCTAGATTCCTTT | 109 | 3479 |
| 1210385 | N/A | N/A | 4056 | 4071 | CTAATCACCCTGCTTA | 112 | 3480 |
| 1210413 | N/A | N/A | 4544 | 4559 | GCCCCCTTCAGTCTCG | 169 | 3481 |
| 1210441 | N/A | N/A | 4889 | 4904 | GCACCTACGAAGCATG | 161 | 3482 |
| 1210469 | N/A | N/A | 5214 | 5229 | GCGGCTGAGCTTTCTC | 156 | 3483 |
| 1210497 | N/A | N/A | 5657 | 5672 | GGCCAAAGCCCCGCGC | 153 | 3484 |
| 1210525 | N/A | N/A | 6065 | 6080 | TTGGAAAGTACCCAAT | 116 | 3485 |
| 1210553 | N/A | N/A | 6356 | 6371 | GTGCGGTGGGACAGGA | 135 | 3486 |
| 1210581 | N/A | N/A | 6607 | 6622 | AGCCTCGCGCAGACTC | 117 | 3487 |
| 1210609 | N/A | N/A | 7083 | 7098 | CTTCGCGCCGCCTGCC | 79 | 3488 |
| 1210637 | N/A | N/A | 7660 | 7675 | CAACGAGGCTGCATCA | 76 | 3489 |
| 1210665 | N/A | N/A | 8549 | 8564 | AACCTTAGACACCTGC | 39 | 3490 |
| 1210693 | N/A | N/A | 9111 | 9126 | TAGGTAGAGTGAATCA | 33 | 3491 |
| 1210721 | N/A | N/A | 9211 | 9226 | CTTAGCTATCATACCA | 28 | 3492 |
| 1210769 | N/A | N/A | 9928 | 9943 | CTGGATCTAAACTGGT | 55 | 3493 |
| 1210795 | N/A | N/A | 10446 | 10461 | TACGGAGACTCCCATC | 158 | 3494 |
| 1210823 | N/A | N/A | 10748 | 10763 | CAGCTATTTCCAACGG | 32 | 3495 |
| 1210851 | N/A | N/A | 11180 | 11195 | TGCAGCCACAATTGTT | 55 | 3496 |
| 1210879 | N/A | N/A | 11965 | 11980 | TATCCCCACACTAAGC | 97 | 3497 |
| 1210907 | N/A | N/A | 12329 | 12344 | ACCAGAACACTAGCCA | 35 | 3498 |
| 1210935 | N/A | N/A | 12853 | 12868 | CTTATGGAACTGCATA | 78 | 3499 |
| 1210963 | N/A | N/A | 13730 | 13745 | CCTGGATTCCATATGA | 147 | 3500 |
| 1210991 | N/A | N/A | 14099 | 14114 | ATGTTTACTGACTGGT | 13 | 3501 |
| 1211019 | N/A | N/A | 14588 | 14603 | GATAAGAATCCCGTCA | 108 | 3502 |
| 1211047 | N/A | N/A | 15154 | 15169 | GCTGATGAAGACCAGC | 67 | 3503 |
| 1211075 | N/A | N/A | 15916 | 15931 | TAGAGATTATGGGTTG | 11 | 3504 |
| 1211103 | N/A | N/A | 16548 | 16563 | TAGGACAGGCTCAATA | 79 | 3505 |
| 1211129 | N/A | N/A | 17263 | 17278 | CTCCCTAGCTAAGCCA | 109 | 3506 |
| 1211156 | N/A | N/A | 18411 | 18426 | AGCGGCTTCCCTTATT | 87 | 3507 |
| 1211184 | N/A | N/A | 18770 | 18785 | CTCCTTTTAGGATCCC | 67 | 3508 |
| 1211236 | N/A | N/A | 19440 | 19455 | ATAACACGCAGCCACT | 57 | 3509 |
| 1211263 | N/A | N/A | 20036 | 20051 | CCACGCCCAAACCTCC | 102 | 3510 |
| 1211291 | N/A | N/A | 20551 | 20566 | TATAAGAGCTGCTGAC | 91 | 3511 |
| 1211319 | N/A | N/A | 21869 | 21884 | ACTTTGGTATCAATTC | 47 | 3512 |
| 1211345 | N/A | N/A | 22700 | 22715 | CAGCGCAGTAAGAGAC | 66 | 3513 |
| 1211373 | N/A | N/A | 23695 | 23710 | GATAGCTACCTGCAGA | 55 | 3514 |
| 1211393 | N/A | N/A | 24890 | 24905 | GAACTACACTTTCAAC | 71 | 3515 |
| 1211421 | N/A | N/A | 26230 | 26245 | TTTCTCGAATCAAATC | 57 | 3516 |
| 1211446 | N/A | N/A | 26862 | 26877 | GATTCTAGTCTAGCAC | 53 | 3517 |
| 1211469 | N/A | N/A | 27523 | 27538 | AGCGGTGTGTGATCGC | 62 | 3518 |
| 1211497 | N/A | N/A | 28540 | 28555 | ATGGACTTTACCATCC | 116 | 3519 |
| 1211531 | N/A | N/A | 29054 | 29069 | AACAGTCAATCAAAGC | 67 | 3520 |
| 1211559 | N/A | N/A | 29642 | 29657 | CATACAACCCTATTTA | 104 | 3521 |
| 1211587 | N/A | N/A | 30290 | 30305 | GACCTTGGTCATTCAT | 90 | 3522 |
| 1211614 | N/A | N/A | 30919 | 30934 | AGGACAAAGTCATGCG | 33 | 3523 |
| 1211642 | N/A | N/A | 31438 | 31453 | AGTGTGGAGCTACTTT | 83 | 3524 |
| 1211667 | N/A | N/A | 31937 | 31952 | TGCGCCCCGCCCACTG | 134 | 3525 |
| 1211695 | N/A | N/A | 32846 | 32861 | GCTCTATAGCTATATT | 41 | 3526 |
| 1211723 | N/A | N/A | 33629 | 33644 | AACCTCGCAAAAGCAC | 75 | 3527 |
| 1211751 | N/A | N/A | 34080 | 34095 | AGAGGGCCTTACATGA | 87 | 3528 |
| 1211779 | N/A | N/A | 34374 | 34389 | CCCTTTGGTTCAGTGA | 51 | 3529 |
| 1211807 | N/A | N/A | 34746 | 34761 | GTAAGTGAGGCCCTGA | 52 | 3530 |
| 1211835 | N/A | N/A | 35134 | 35149 | GCAGCGACTAACTACA | 114 | 3531 |
| 1211863 | N/A | N/A | 35446 | 35461 | GTGCTAACTCTTGTCT | 61 | 3532 |
| 1211891 | N/A | N/A | 35866 | 35881 | GCACCCGCGCCCCCCC | 104 | 3533 |
| 1211919 | N/A | N/A | 36366 | 36381 | CAAGCAATGCCTATGG | 96 | 3534 |
| 1211947 | N/A | N/A | 36697 | 36712 | CCTAGGCCTTAATACC | 124 | 3535 |

TABLE 57
Percent control of human PMP22 RNA with 3-10-3 cEt gapmers

| | SEQ | SEQ | SEQ | SEQ | | | |
|---|---|---|---|---|---|---|---|
| | ID | ID | ID | ID | | | |
| | NO: 1 | NO: 1 | NO: 2 | NO: 2 | | PMP22 | SEQ |
| Compound | Start | Stop | Start | Stop | Sequence | (% | ID |
| ID | Site | Site | Site | Site | (5′ to 3′) | UTC) | NO |
| 684267 | 864 | 879 | 37227 | 37242 | ATCTTCAATCAACAGC | 25 | 30 |
| 684394 | 1489 | 1504 | 37852 | 37867 | ATTATTCAGGTCTCCA | 15 | 31 |
| 684394 | 1489 | 1504 | 37852 | 37867 | ATTATTCAGGTCTCCA | 12 | 31 |
| 1078914 | N/A | N/A | 31462 | 31477 | CGCTTGTAGATTTCAC | 12 | 3536 |
| 1079056 | N/A | N/A | 19074 | 19089 | AAGGCAGTTGCAATTG | 82 | 3537 |
| 1120799 | N/A | N/A | 28802 | 28817 | TGTTGATACGCCTGGC | 87 | 3538 |
| 1209878 | N/A | N/A | 4272 | 4287 | ATTCTTACGGTAAGTA | 122 | 3539 |
| 1209906 | N/A | N/A | 8628 | 8643 | GTAAATGGAGAAGTTC | 35 | 3540 |
| 1209934 | N/A | N/A | 10281 | 10296 | TAATTTCTGGGATGGC | 31 | 3541 |
| 1209962 | N/A | N/A | 14100 | 14115 | CATGTTTACTGACTGG | 80 | 3542 |
| 1209990 | N/A | N/A | 15855 | 15870 | AAATGCAGAAGGTCTC | 47 | 3543 |
| 1210018 | N/A | N/A | 18624 | 18639 | GTTACCTAATTTGTTA | 141 | 3544 |
| 1210046 | N/A | N/A | 20107 | 20122 | GAGTTATTAACACCTC | 119 | 3545 |
| 1210074 | N/A | N/A | 23161 | 23176 | CGAAGAAGAGTTTGGT | 35 | 3546 |
| 1210103 | N/A | N/A | 23891 | 23906 | GCTAAGTATAAAATTG | 81 | 3547 |
| 1210131 | N/A | N/A | 26170 | 26185 | GAATACCTACTGCTTT | 71 | 3548 |
| 1210159 | N/A | N/A | 26796 | 26811 | GTCAATTAAAGTAAGA | 71 | 3549 |
| 1210187 | N/A | N/A | 28587 | 28602 | TCTACTAAACTAATCA | 69 | 3550 |
| 1210216 | N/A | N/A | 29812 | 29827 | AAGTAGCAAAGCACTG | 98 | 3551 |
| 1210244 | N/A | N/A | 30459 | 30474 | CATTTACCTTCCATTG | 27 | 3552 |
| 1210272 | N/A | N/A | 31751 | 31766 | TAATTTGGCAAACCAT | 72 | 3553 |
| 1210300 | N/A | N/A | 34473 | 34488 | AGTGATTAGAGCCCAG | 11 | 3554 |
| 1210328 | N/A | N/A | 36463 | 36478 | CCATTATTGGAGTCAC | 38 | 3555 |
| 1210358 | N/A | N/A | 3104 | 3119 | AAGCATCTAGATTCCT | 109 | 3556 |
| 1210386 | N/A | N/A | 4066 | 4081 | TCCAACAAACCTAATC | 83 | 3557 |
| 1210414 | N/A | N/A | 4546 | 4561 | TAGCCCCCTTCAGTCT | 152 | 3558 |
| 1210442 | N/A | N/A | 4891 | 4906 | CTGCACCTACGAAGCA | 98 | 3559 |
| 1210470 | N/A | N/A | 5217 | 5232 | GAGGCGGCTGAGCTTT | 153 | 3560 |
| 1210498 | N/A | N/A | 5684 | 5699 | GCCCCTAAACAGAAGC | 85 | 3561 |
| 1210526 | N/A | N/A | 6068 | 6083 | AGTTTGGAAAGTACCC | 146 | 3562 |
| 1210554 | N/A | N/A | 6368 | 6383 | GCTCCGGTCTGGGTGC | 122 | 3563 |
| 1210582 | N/A | N/A | 6628 | 6643 | GAACGGTCCTGGCCCC | 85 | 3564 |
| 1210610 | N/A | N/A | 7085 | 7100 | GCCTTCGCGCCGCCTG | 144 | 3565 |
| 1210638 | N/A | N/A | 7703 | 7718 | ACTATGGTTTGGAGAA | 65 | 3566 |
| 1210666 | N/A | N/A | 8551 | 8566 | TCAACCTTAGACACCT | 84 | 3567 |
| 1210694 | N/A | N/A | 9115 | 9130 | TCTCTAGGTAGAGTGA | 92 | 3568 |
| 1210722 | N/A | N/A | 9214 | 9229 | AGGCTTAGCTATCATA | 71 | 3569 |
| 1210742 | N/A | N/A | 9522 | 9537 | CAAAGATGCTGAGGAC | 21 | 3570 |
| 1210770 | N/A | N/A | 9931 | 9946 | GAACTGGATCTAAACT | 63 | 3571 |
| 1210796 | N/A | N/A | 10448 | 10463 | AGTACGGAGACTCCCA | 147 | 3572 |
| 1210824 | N/A | N/A | 10761 | 10776 | TAGCACCAACTGACAG | 68 | 3573 |
| 1210852 | N/A | N/A | 11181 | 11196 | CTGCAGCCACAATTGT | 117 | 3574 |
| 1210880 | N/A | N/A | 11968 | 11983 | GAATATCCCCACACTA | 67 | 3575 |
| 1210908 | N/A | N/A | 12333 | 12348 | CCTAACCAGAACACTA | 98 | 3576 |
| 1210936 | N/A | N/A | 12858 | 12873 | TGGGACTTATGGAACT | 64 | 3577 |
| 1210964 | N/A | N/A | 13774 | 13789 | AATGAGGAGTGATATA | 91 | 3578 |
| 1210992 | N/A | N/A | 14146 | 14161 | CCATTACCCTGTCTTA | 84 | 3579 |
| 1211020 | N/A | N/A | 14590 | 14605 | GTGATAAGAATCCCGT | 89 | 3580 |
| 1211048 | N/A | N/A | 15235 | 15250 | GAGGACTTTGTGAGCA | 36 | 3581 |
| 1211076 | N/A | N/A | 15921 | 15936 | TTGGGTAGAGATTATG | 50 | 3582 |
| 1211104 | N/A | N/A | 16550 | 16565 | CATAGGACAGGCTCAA | 28 | 3583 |
| 1211130 | N/A | N/A | 17323 | 17338 | TCCCTACATCTAACCC | 104 | 3584 |
| 1211157 | N/A | N/A | 18413 | 18428 | AGAGCGGCTTCCCTTA | 106 | 3585 |
| 1211185 | N/A | N/A | 18772 | 18787 | ACCTCCTTTTAGGATC | 82 | 3586 |
| 1211237 | N/A | N/A | 19442 | 19457 | GAATAACACGCAGCCA | 34 | 3587 |
| 1211264 | N/A | N/A | 20038 | 20053 | TCCCACGCCCAAACCT | 105 | 3588 |
| 1211292 | N/A | N/A | 20558 | 20573 | TGTCCGGTATAAGAGC | 59 | 3589 |
| 1211320 | N/A | N/A | 21873 | 21888 | TACAACTTTGGTATCA | 43 | 3590 |
| 1211346 | N/A | N/A | 22702 | 22717 | ACCAGCGCAGTAAGAG | 79 | 3591 |
| 1211374 | N/A | N/A | 23701 | 23716 | ATAAGTGATAGCTACC | 29 | 3592 |
| 1211394 | N/A | N/A | 24896 | 24911 | AAGAGTGAACTACACT | 74 | 3593 |
| 1211422 | N/A | N/A | 26236 | 26251 | AAGTTATTTCTCGAAT | 89 | 3594 |
| 1211447 | N/A | N/A | 26874 | 26889 | TAAGAGGCCTTTGATT | 89 | 3595 |
| 1211470 | N/A | N/A | 27525 | 27540 | AGAGCGGTGTGTGATC | 88 | 3596 |
| 1211498 | N/A | N/A | 28543 | 28558 | CACATGGACTTTACCA | 70 | 3597 |
| 1211532 | N/A | N/A | 29068 | 29083 | CACCAGAGGATGACAA | 79 | 3598 |
| 1211560 | N/A | N/A | 29644 | 29659 | CCCATACAACCCTATT | 51 | 3599 |
| 1211588 | N/A | N/A | 30314 | 30329 | AACCGTCCCTGTCATG | 40 | 3600 |
| 1211615 | N/A | N/A | 30944 | 30959 | GCAGCTAGATGTAAAG | 59 | 3601 |
| 1211668 | N/A | N/A | 32259 | 32274 | AGACCTGAATACTGTC | 105 | 3602 |
| 1211696 | N/A | N/A | 33194 | 33209 | TAATCCCCCCCCACCA | 100 | 3603 |
| 1211724 | N/A | N/A | 33631 | 33646 | GTAACCTCGCAAAAGC | 73 | 3604 |
| 1211752 | N/A | N/A | 34100 | 34115 | CTCACTAAGGGTCAGG | 64 | 3605 |
| 1211780 | N/A | N/A | 34398 | 34413 | CAGTACATCCTTATCA | 89 | 3606 |
| 1211808 | N/A | N/A | 34750 | 34765 | AAGGGTAAGTGAGGCC | 125 | 3607 |
| 1211836 | N/A | N/A | 35142 | 35157 | AGAGAAGTGCAGCGAC | 46 | 3608 |
| 1211864 | N/A | N/A | 35450 | 35465 | CAAAGTGCTAACTCTT | 69 | 3609 |
| 1211892 | N/A | N/A | 35868 | 35883 | ATGCACCCGCGCCCCC | 113 | 3610 |
| 1211920 | N/A | N/A | 36368 | 36383 | AGCAAGCAATGCCTAT | 109 | 3611 |
| 1211948 | N/A | N/A | 36701 | 36716 | GCCACCTAGGCCTTAA | 102 | 3612 |

TABLE 58
Percent control of human PMP22 RNA with 3-10-3 cEt gapmers

| | SEQ | SEQ | SEQ | SEQ | | | |
|---|---|---|---|---|---|---|---|
| | ID | ID | ID | ID | | | |
| | NO: 1 | NO: 1 | NO: 2 | NO: 2 | | PMP22 | SEQ |
| Compound | Start | Stop | Start | Stop | Sequence | (% | ID |
| ID | Site | Site | Site | Site | (5′ to 3′) | UTC) | NO |
| 684267 | 864 | 879 | 37227 | 37242 | ATCTTCAATCAACAGC | 11 | 30 |
| 684394 | 1489 | 1504 | 37852 | 37867 | ATTATTCAGGTCTCCA | 4 | 31 |
| 684394 | 1489 | 1504 | 37852 | 37867 | ATTATTCAGGTCTCCA | 10 | 31 |
| 1078916 | N/A | N/A | 31464 | 31479 | CACGCTTGTAGATTTC | 14 | 3613 |
| 1079045 | N/A | N/A | 19081 | 19096 | GACGGGAAAGGCAGTT | 37 | 3614 |
| 1120800 | N/A | N/A | 28803 | 28818 | CTGTTGATACGCCTGG | 51 | 3615 |
| 1209879 | N/A | N/A | 4275 | 4290 | TATATTCTTACGGTAA | 96 | 3616 |
| 1209907 | N/A | N/A | 8644 | 8659 | GACTTAAAAGCACCTT | 47 | 3617 |
| 1209935 | N/A | N/A | 10283 | 10298 | CGTAATTTCTGGGATG | 7 | 3618 |
| 1209963 | N/A | N/A | 14134 | 14149 | CTTATATAGTTCTTAC | 91 | 3619 |
| 1209991 | N/A | N/A | 15856 | 15871 | TAAATGCAGAAGGTCT | 25 | 3620 |
| 1210019 | N/A | N/A | 19168 | 19183 | CAAACGGATTTATCAG | 29 | 3621 |
| 1210047 | N/A | N/A | 20333 | 20348 | AGTATGAAGCACTTTT | 4 | 3622 |
| 1210075 | N/A | N/A | 23162 | 23177 | ACGAAGAAGAGTTTGG | 25 | 3623 |
| 1210104 | N/A | N/A | 23949 | 23964 | AAATCTCTAGTTCGCA | 24 | 3624 |
| 1210132 | N/A | N/A | 26173 | 26188 | GTTGAATACCTACTGC | 61 | 3625 |
| 1210160 | N/A | N/A | 26878 | 26893 | AATCTAAGAGGCCTTT | 45 | 3626 |
| 1210188 | N/A | N/A | 28668 | 28683 | CATACAAGCACCCACC | 58 | 3627 |
| 1210217 | N/A | N/A | 29814 | 29829 | GTAAGTAGCAAAGCAC | 22 | 3628 |
| 1210245 | N/A | N/A | 30524 | 30539 | TATAGTACAGGCTTGT | 24 | 3629 |
| 1210273 | N/A | N/A | 31752 | 31767 | ATAATTTGGCAAACCA | 24 | 3630 |
| 1210301 | N/A | N/A | 34594 | 34609 | TACAAGAGTTTCTCCC | 45 | 3631 |
| 1210329 | N/A | N/A | 36464 | 36479 | ACCATTATTGGAGTCA | 13 | 3632 |
| 1210359 | N/A | N/A | 3161 | 3176 | CTGCTTACCAAGGCCA | 164 | 3633 |
| 1210387 | N/A | N/A | 4093 | 4108 | CAGTGGTTAGGCACTC | 71 | 3634 |
| 1210415 | N/A | N/A | 4551 | 4566 | GAGGCTAGCCCCCTTC | 109 | 3635 |
| 1210443 | N/A | N/A | 4899 | 4914 | ATTACTGTCTGCACCT | 175 | 3636 |
| 1210471 | N/A | N/A | 5225 | 5240 | CGAAACCAGAGGCGGC | 101 | 3637 |
| 1210499 | N/A | N/A | 5733 | 5748 | ATTACTCCAAGACCCA | 174 | 3638 |
| 1210527 | N/A | N/A | 6147 | 6162 | GCTGTGAAAGATCTGG | 232 | 3639 |
| 1210555 | N/A | N/A | 6373 | 6388 | CCTGAGCTCCGGTCTG | 111 | 3640 |
| 1210583 | N/A | N/A | 6635 | 6650 | CGTAGAGGAACGGTCC | 84 | 3641 |
| 1210611 | N/A | N/A | 7090 | 7105 | CAGGAGCCTTCGCGCC | 74 | 3642 |
| 1210639 | N/A | N/A | 7706 | 7721 | CTGACTATGGTTTGGA | 53 | 3643 |
| 1210667 | N/A | N/A | 8556 | 8571 | TGAACTCAACCTTAGA | 73 | 3644 |
| 1210695 | N/A | N/A | 9123 | 9138 | AGGGCATGTCTCTAGG | 69 | 3645 |
| 1210723 | N/A | N/A | 9221 | 9236 | CTGCCAAAGGCTTAGC | 78 | 3646 |
| 1210743 | N/A | N/A | 9525 | 9540 | AAGCAAAGATGCTGAG | 48 | 3647 |
| 1210771 | N/A | N/A | 9934 | 9949 | ACTGAACTGGATCTAA | 22 | 3648 |
| 1210797 | N/A | N/A | 10454 | 10469 | GTAGCGAGTACGGAGA | 29 | 3649 |
| 1210825 | N/A | N/A | 10790 | 10805 | AACCCTAGTGCCTCTT | 19 | 3650 |
| 1210853 | N/A | N/A | 11183 | 11198 | GTCTGCAGCCACAATT | 46 | 3651 |
| 1210881 | N/A | N/A | 11974 | 11989 | CATAACGAATATCCCC | 11 | 3652 |
| 1210909 | N/A | N/A | 12338 | 12353 | CTAATCCTAACCAGAA | 96 | 3653 |
| 1210937 | N/A | N/A | 12861 | 12876 | AACTGGGACTTATGGA | 43 | 3654 |
| 1210965 | N/A | N/A | 13796 | 13811 | AACGGCCTCTGAAAGG | 90 | 3655 |
| 1210993 | N/A | N/A | 14151 | 14166 | TTATCCCATTACCCTG | 90 | 3656 |
| 1211021 | N/A | N/A | 14715 | 14730 | GAACCTACTTACTACT | 59 | 3657 |
| 1211049 | N/A | N/A | 15288 | 15303 | CTAACACCTCAGCATG | 88 | 3658 |
| 1211077 | N/A | N/A | 15927 | 15942 | CATTCCTTGGGTAGAG | 25 | 3659 |
| 1211105 | N/A | N/A | 16617 | 16632 | ACAATGGCAGGGACCT | 78 | 3660 |
| 1211131 | N/A | N/A | 17325 | 17340 | ACTCCCTACATCTAAC | 86 | 3661 |
| 1211158 | N/A | N/A | 18431 | 18446 | GAATGGTGTGGCAAAG | 92 | 3662 |
| 1211186 | N/A | N/A | 18799 | 18814 | CCATTGCCAAGGCCCA | 146 | 3663 |
| 1211238 | N/A | N/A | 19506 | 19521 | GTCTAGTTCTGCACTT | 58 | 3664 |
| 1211265 | N/A | N/A | 20041 | 20056 | GACTCCCACGCCCAAA | 79 | 3665 |
| 1211293 | N/A | N/A | 20566 | 20581 | TCTGAGAGTGTCCGGT | 85 | 3666 |
| 1211321 | N/A | N/A | 21875 | 21890 | GATACAACTTTGGTAT | 82 | 3667 |
| 1211347 | N/A | N/A | 22706 | 22721 | AACAACCAGCGCAGTA | 82 | 3668 |
| 1211375 | N/A | N/A | 23809 | 23824 | TCACTAGCAACCAAGG | 39 | 3669 |
| 1211395 | N/A | N/A | 24935 | 24950 | TGTATACACTTCTAAG | 87 | 3670 |
| 1211423 | N/A | N/A | 26272 | 26287 | TAGTCCCAACCCCATT | 100 | 3671 |
| 1211448 | N/A | N/A | 26884 | 26899 | CAGCCAAATCTAAGAG | 53 | 3672 |
| 1211471 | N/A | N/A | 27539 | 27554 | ATTAGCCTCAGCACAG | 78 | 3673 |
| 1211499 | N/A | N/A | 28552 | 28567 | CCCCGCTTCCACATGG | 146 | 3674 |
| 1211533 | N/A | N/A | 29092 | 29107 | GACACAAGAGTGTCAA | 80 | 3675 |
| 1211561 | N/A | N/A | 29664 | 29679 | CTAACCTTGGGCTGTG | 42 | 3676 |
| 1211589 | N/A | N/A | 30317 | 30332 | CTCAACCGTCCCTGTC | 40 | 3677 |
| 1211616 | N/A | N/A | 30949 | 30964 | CGTAAGCAGCTAGATG | 58 | 3678 |
| 1211669 | N/A | N/A | 32262 | 32277 | ATGAGACCTGAATACT | 54 | 3679 |
| 1211697 | N/A | N/A | 33196 | 33211 | ATTAATCCCCCCCCAC | 120 | 3680 |
| 1211725 | N/A | N/A | 33634 | 33649 | TTGGTAACCTCGCAAA | 94 | 3681 |
| 1211753 | N/A | N/A | 34105 | 34120 | ATTAGCTCACTAAGGG | 73 | 3682 |
| 1211781 | N/A | N/A | 34400 | 34415 | CCCAGTACATCCTTAT | 119 | 3683 |
| 1211809 | N/A | N/A | 34754 | 34769 | TGGCAAGGGTAAGTGA | 64 | 3684 |
| 1211837 | N/A | N/A | 35190 | 35205 | AGATACCAGATTCCAT | 47 | 3685 |
| 1211865 | N/A | N/A | 35467 | 35482 | TCCACGGCTTGCATCT | 53 | 3686 |
| 1211893 | N/A | N/A | 35870 | 35885 | CAATGCACCCGCGCCC | 99 | 3687 |
| 1211921 | N/A | N/A | 36377 | 36392 | ACCAGGTGAAGCAAGC | 88 | 3688 |
| 1211949 | N/A | N/A | 36709 | 36724 | CAATCTTGGCCACCTA | 68 | 3689 |

TABLE 59
Percent control of human PMP22 RNA with 3-10-3 cEt gapmers

| | SEQ | SEQ | SEQ | SEQ | | | |
|---|---|---|---|---|---|---|---|
| | ID | ID | ID | ID | | | |
| | NO: 1 | NO: 1 | NO: 2 | NO: 2 | | PMP22 | SEQ |
| Compound | Start | Stop | Start | Stop | Sequence | (% | ID |
| ID | Site | Site | Site | Site | (5′ to 3′) | UTC) | NO |
| 684267 | 864 | 879 | 37227 | 37242 | ATCTTCAATCAACAGC | 16 | 30 |
| 684394 | 1489 | 1504 | 37852 | 37867 | ATTATTCAGGTCTCCA | 9 | 31 |
| 684394 | 1489 | 1504 | 37852 | 37867 | ATTATTCAGGTCTCCA | 10 | 31 |
| 1078919 | N/A | N/A | 31467 | 31482 | ATGCACGCTTGTAGAT | 72 | 3690 |
| 1079046 | N/A | N/A | 19082 | 19097 | TGACGGGAAAGGCAGT | 43 | 3691 |
| 1120801 | N/A | N/A | 28804 | 28819 | CCTGTTGATACGCCTG | 11 | 3692 |
| 1205175 | N/A | N/A | 19520 | 19535 | GCTAGTTTGTCAGGGT | 13 | 3693 |
| 1209880 | N/A | N/A | 4276 | 4291 | GTATATTCTTACGGTA | 118 | 3694 |
| 1209908 | N/A | N/A | 8645 | 8660 | TGACTTAAAAGCACCT | 27 | 3695 |
| 1209936 | N/A | N/A | 10321 | 10336 | CATTTACTCAGTTGCC | 27 | 3696 |
| 1209964 | N/A | N/A | 14286 | 14301 | ACTACGCCAAGCTCCT | 110 | 3697 |
| 1209992 | N/A | N/A | 15857 | 15872 | ATAAATGCAGAAGGTC | 24 | 3698 |
| 1210020 | N/A | N/A | 19182 | 19197 | AACTTAGTGTCTTTCA | 3 | 3699 |
| 1210048 | N/A | N/A | 21297 | 21312 | GCAAAGTGGAGGCCTG | 137 | 3700 |
| 1210076 | N/A | N/A | 23165 | 23180 | GCAACGAAGAAGAGTT | 108 | 3701 |
| 1210105 | N/A | N/A | 23951 | 23966 | TTAAATCTCTAGTTCG | 64 | 3702 |
| 1210133 | N/A | N/A | 26216 | 26231 | TCAGAATTAGAGGATC | 15 | 3703 |
| 1210161 | N/A | N/A | 26879 | 26894 | AAATCTAAGAGGCCTT | 86 | 3704 |
| 1210189 | N/A | N/A | 28744 | 28759 | ATATGCATCTCATTCC | 28 | 3705 |
| 1210218 | N/A | N/A | 29869 | 29884 | CATTTAACAGAGCCAG | 48 | 3706 |
| 1210246 | N/A | N/A | 30529 | 30544 | GGTCTTATAGTACAGG | 13 | 3707 |
| 1210274 | N/A | N/A | 31753 | 31768 | GATAATTTGGCAAACC | 9 | 3708 |
| 1210302 | N/A | N/A | 34596 | 34611 | CTTACAAGAGTTTCTC | 47 | 3709 |
| 1210330 | N/A | N/A | 36533 | 36548 | AAATCTATATGCCACT | 151 | 3710 |
| 1210360 | N/A | N/A | 3167 | 3182 | CCTAACCTGCTTACCA | 160 | 3711 |
| 1210388 | N/A | N/A | 4125 | 4140 | TATATGCATGGTCTGT | 153 | 3712 |
| 1210416 | N/A | N/A | 4554 | 4569 | AGAGAGGCTAGCCCCC | 106 | 3713 |
| 1210444 | N/A | N/A | 4905 | 4920 | CCCGCTATTACTGTCT | 121 | 3714 |
| 1210472 | N/A | N/A | 5228 | 5243 | ACTCGAAACCAGAGGC | 95 | 3715 |
| 1210500 | N/A | N/A | 5753 | 5768 | ATAAAGGCTCTCCTCG | 123 | 3716 |
| 1210528 | N/A | N/A | 6160 | 6175 | GAGGACATGCATGGCT | 260 | 3717 |
| 1210556 | N/A | N/A | 6382 | 6397 | CCCAACAAGCCTGAGC | 63 | 3718 |
| 1210584 | N/A | N/A | 6672 | 6687 | TTCCGTTTGTCTCCAA | 174 | 3719 |
| 1210612 | N/A | N/A | 7098 | 7113 | GCGCGGGTCAGGAGCC | 111 | 3720 |
| 1210640 | N/A | N/A | 7744 | 7759 | AAGTCCTAAAAGGGTG | 94 | 3721 |
| 1210668 | N/A | N/A | 8604 | 8619 | CACAGAAACGATTATG | 82 | 3722 |
| 1210696 | N/A | N/A | 9126 | 9141 | CTAAGGGCATGTCTCT | 38 | 3723 |
| 1210724 | N/A | N/A | 9247 | 9262 | CGTTTGATCCAATGTC | 1 | 3724 |
| 1210744 | N/A | N/A | 9536 | 9551 | CCATATCTCACAAGCA | 19 | 3725 |
| 1210772 | N/A | N/A | 9963 | 9978 | GGACCAAAGGCCACTT | 108 | 3726 |
| 1210798 | N/A | N/A | 10458 | 10473 | GTCAGTAGCGAGTACG | 82 | 3727 |
| 1210826 | N/A | N/A | 10792 | 10807 | ATAACCCTAGTGCCTC | 13 | 3728 |
| 1210854 | N/A | N/A | 11184 | 11199 | TGTCTGCAGCCACAAT | 88 | 3729 |
| 1210882 | N/A | N/A | 11978 | 11993 | ATATCATAACGAATAT | 92 | 3730 |
| 1210910 | N/A | N/A | 12349 | 12364 | CACAATCAATCCTAAT | 72 | 3731 |
| 1210938 | N/A | N/A | 12933 | 12948 | ATGTGAGAATGGTGGG | 79 | 3732 |
| 1210966 | N/A | N/A | 13800 | 13815 | AATGAACGGCCTCTGA | 92 | 3733 |
| 1210994 | N/A | N/A | 14231 | 14246 | TGGAACCTCCCCGAGA | 108 | 3734 |
| 1211022 | N/A | N/A | 14719 | 14734 | GAGGGAACCTACTTAC | 123 | 3735 |
| 1211050 | N/A | N/A | 15292 | 15307 | GTGCCTAACACCTCAG | 148 | 3736 |
| 1211078 | N/A | N/A | 15956 | 15971 | ATCTCATAAGAGCCTG | 23 | 3737 |
| 1211106 | N/A | N/A | 16636 | 16651 | CCAACTCCTTGTGAGC | 92 | 3738 |
| 1211132 | N/A | N/A | 17329 | 17344 | CCTAACTCCCTACATC | 130 | 3739 |
| 1211159 | N/A | N/A | 18470 | 18485 | CAGACTTAGAATCCAC | 15 | 3740 |
| 1211187 | N/A | N/A | 18806 | 18821 | TTCTACCCCATTGCCA | 79 | 3741 |
| 1211266 | N/A | N/A | 20044 | 20059 | CAGGACTCCCACGCCC | 89 | 3742 |
| 1211294 | N/A | N/A | 20585 | 20600 | CTCTTTGCAGGCCTCC | 106 | 3743 |
| 1211322 | N/A | N/A | 21877 | 21892 | TTGATACAACTTTGGT | 46 | 3744 |
| 1211348 | N/A | N/A | 22710 | 22725 | AGGTAACAACCAGCGC | 130 | 3745 |
| 1211376 | N/A | N/A | 23811 | 23826 | CCTCACTAGCAACCAA | 77 | 3746 |
| 1211396 | N/A | N/A | 24944 | 24959 | AGAGGACAATGTATAC | 24 | 3747 |
| 1211424 | N/A | N/A | 26275 | 26290 | TTTTAGTCCCAACCCC | 101 | 3748 |
| 1211449 | N/A | N/A | 26951 | 26966 | ATCAACTAGTCCAGCT | 99 | 3749 |
| 1211472 | N/A | N/A | 27553 | 27568 | CTCTGATCATGGCCAT | 135 | 3750 |
| 1211500 | N/A | N/A | 28554 | 28569 | CACCCCGCTTCCACAT | 108 | 3751 |
| 1211534 | N/A | N/A | 29096 | 29111 | ATGTGACACAAGAGTG | 121 | 3752 |
| 1211562 | N/A | N/A | 29685 | 29700 | TCTAGACAAGGTCACC | 81 | 3753 |
| 1211590 | N/A | N/A | 30326 | 30341 | AGTGTAACACTCAACC | 27 | 3754 |
| 1211617 | N/A | N/A | 30987 | 31002 | GTGGACCAACAGATAA | 49 | 3755 |
| 1211670 | N/A | N/A | 32269 | 32284 | TCCAGGGATGAGACCT | 68 | 3756 |
| 1211698 | N/A | N/A | 33201 | 33216 | CTTTTATTAATCCCCC | 62 | 3757 |
| 1211726 | N/A | N/A | 33636 | 33651 | CTTTGGTAACCTCGCA | 34 | 3758 |
| 1211754 | N/A | N/A | 34109 | 34124 | GCTGATTAGCTCACTA | 100 | 3759 |
| 1211782 | N/A | N/A | 34404 | 34419 | AATTCCCAGTACATCC | 83 | 3760 |
| 1211810 | N/A | N/A | 34773 | 34788 | ATGTATCACCAGGTCC | 19 | 3761 |
| 1211838 | N/A | N/A | 35194 | 35209 | GAGGAGATACCAGATT | 55 | 3762 |
| 1211866 | N/A | N/A | 35476 | 35491 | CCCCACTCTTCCACGG | 72 | 3763 |
| 1211894 | N/A | N/A | 35894 | 35909 | GGATTCATGCAGTTCC | 102 | 3764 |
| 1211922 | N/A | N/A | 36380 | 36395 | CATACCAGGTGAAGCA | 53 | 3765 |
| 1211950 | N/A | N/A | 36779 | 36794 | TCCAGGTCCAGAATTG | 65 | 3766 |

TABLE 60
Percent control of human PMP22 RNA with 3-10-3 cEt gapmers

| | SEQ | SEQ | SEQ | SEQ | | | |
|---|---|---|---|---|---|---|---|
| | ID | ID | ID | ID | | | |
| | NO: 1 | NO: 1 | NO: 2 | NO: 2 | | PMP22 | SEQ |
| Compound | Start | Stop | Start | Stop | Sequence | (% | ID |
| ID | Site | Site | Site | Site | (5′ to 3′) | UTC) | NO |
| 684267 | 864 | 879 | 37227 | 37242 | ATCTTCAATCAACAGC | 8 | 30 |
| 684394 | 1489 | 1504 | 37852 | 37867 | ATTATTCAGGTCTCCA | 6 | 31 |
| 684394 | 1489 | 1504 | 37852 | 37867 | ATTATTCAGGTCTCCA | 7 | 31 |
| 1120802 | N/A | N/A | 28805 | 28820 | TCCTGTTGATACGCCT | 10 | 3767 |
| 1205186 | N/A | N/A | 23866 | 23881 | GTGATTAGCAAAGGAG | 15 | 3768 |
| 1205243 | N/A | N/A | 26955 | 26970 | AGAGATCAACTAGTCC | 34 | 3769 |
| 1209881 | N/A | N/A | 4277 | 4292 | TGTATATTCTTACGGT | 117 | 3770 |
| 1209909 | N/A | N/A | 8647 | 8662 | TATGACTTAAAAGCAC | 46 | 3771 |
| 1209937 | N/A | N/A | 10659 | 10674 | ACAACTTAGCAACTCC | 7 | 3772 |
| 1209965 | N/A | N/A | 14592 | 14607 | AAGTGATAAGAATCCC | 48 | 3773 |
| 1209993 | N/A | N/A | 15859 | 15874 | CCATAAATGCAGAAGG | 48 | 3774 |
| 1210021 | N/A | N/A | 19186 | 19201 | TCAAAACTTAGTGTCT | 17 | 3775 |
| 1210049 | N/A | N/A | 21423 | 21438 | TAGATTAACACAAGCC | 30 | 3776 |
| 1210077 | N/A | N/A | 23228 | 23243 | CGTAGAGAAAGAGCCA | 22 | 3777 |
| 1210106 | N/A | N/A | 23987 | 24002 | ACATAGTGTTGGCTAT | 53 | 3778 |
| 1210134 | N/A | N/A | 26226 | 26241 | TCGAATCAAATCAGAA | 96 | 3779 |
| 1210162 | N/A | N/A | 26883 | 26898 | AGCCAAATCTAAGAGG | 100 | 3780 |
| 1210190 | N/A | N/A | 28858 | 28873 | TACAGATAGCCTCAGT | 26 | 3781 |
| 1210219 | N/A | N/A | 29870 | 29885 | TCATTTAACAGAGCCA | 32 | 3782 |
| 1210247 | N/A | N/A | 30543 | 30558 | TTTCAATGTGACTGGG | 1 | 3783 |
| 1210275 | N/A | N/A | 32285 | 32300 | CTATTAAATGAGAGTC | 26 | 3784 |
| 1210303 | N/A | N/A | 34598 | 34613 | AACTTACAAGAGTTTC | 125 | 3785 |
| 1210331 | 682 | 697 | 37045 | 37060 | ATAGATGACACCGCTG | 34 | 3786 |
| 1210361 | N/A | N/A | 3170 | 3185 | CTCCCTAACCTGCTTA | 159 | 3787 |
| 1210389 | N/A | N/A | 4158 | 4173 | GCCCGTTATATGCCAA | 131 | 3788 |
| 1210417 | N/A | N/A | 4596 | 4611 | TGATTCATAGCCTCCT | 264 | 3789 |
| 1210445 | N/A | N/A | 4908 | 4923 | GTCCCCGCTATTACTG | 181 | 3790 |
| 1210473 | N/A | N/A | 5236 | 5251 | CGACTTTTACTCGAAA | 91 | 3791 |
| 1210501 | N/A | N/A | 5758 | 5773 | AGACCATAAAGGCTCT | 88 | 3792 |
| 1210529 | N/A | N/A | 6167 | 6182 | CCTGTTAGAGGACATG | 149 | 3793 |
| 1210557 | N/A | N/A | 6387 | 6402 | CGAACCCCAACAAGCC | 118 | 3794 |
| 1210585 | N/A | N/A | 6674 | 6689 | CATTCCGTTTGTCTCC | 122 | 3795 |
| 1210613 | N/A | N/A | 7100 | 7115 | CCGCGCGGGTCAGGAG | 190 | 3796 |
| 1210641 | N/A | N/A | 7796 | 7811 | ATGGGACCTGTGAACT | 70 | 3797 |
| 1210669 | N/A | N/A | 8621 | 8636 | GAGAAGTTCCACATGC | 57 | 3798 |
| 1210697 | N/A | N/A | 9130 | 9145 | GGCACTAAGGGCATGT | 57 | 3799 |
| 1210725 | N/A | N/A | 9320 | 9335 | TAGCCCCACTGTCACT | 102 | 3800 |
| 1210745 | N/A | N/A | 9568 | 9583 | TCCCTTAATTTGACCC | 17 | 3801 |
| 1210773 | N/A | N/A | 9980 | 9995 | TGGATTATGCAAAGCC | 5 | 3802 |
| 1210799 | N/A | N/A | 10471 | 10486 | GTAACCACCAGGTGTC | 47 | 3803 |
| 1210827 | N/A | N/A | 10876 | 10891 | CTAAGGAGGCATTGTA | 15 | 3804 |
| 1210855 | N/A | N/A | 11187 | 11202 | TATTGTCTGCAGCCAC | 4 | 3805 |
| 1210883 | N/A | N/A | 11990 | 12005 | GCACTGGATACAATAT | 37 | 3806 |
| 1210911 | N/A | N/A | 12358 | 12373 | TCTCTTATACACAATC | 9 | 3807 |
| 1210939 | N/A | N/A | 12960 | 12975 | AGGTCCTAAAGTTTCT | 97 | 3808 |
| 1210967 | N/A | N/A | 13803 | 13818 | ACCAATGAACGGCCTC | 101 | 3809 |
| 1210995 | N/A | N/A | 14233 | 14248 | TATGGAACCTCCCCGA | 58 | 3810 |
| 1211023 | N/A | N/A | 14721 | 14736 | CAGAGGGAACCTACTT | 83 | 3811 |
| 1211051 | N/A | N/A | 15358 | 15373 | GCTTTGGTGTTGAGCA | 122 | 3812 |
| 1211079 | N/A | N/A | 15977 | 15992 | TTGTACCACCAGGGTC | 45 | 3813 |
| 1211107 | N/A | N/A | 16676 | 16691 | TACCCATAGTGATGCA | 53 | 3814 |
| 1211133 | N/A | N/A | 17384 | 17399 | AGTTACACACCAGTTG | 15 | 3815 |
| 1211160 | N/A | N/A | 18515 | 18530 | ATATGCTTGCAATCTA | 19 | 3816 |
| 1211188 | N/A | N/A | 18810 | 18825 | GCAATTCTACCCCATT | 91 | 3817 |
| 1211212 | N/A | N/A | 19093 | 19108 | GCCATAGAAAATGACG | 91 | 3818 |
| 1211239 | N/A | N/A | 19594 | 19609 | GTATTCCAGCTAACTT | 27 | 3819 |
| 1211267 | N/A | N/A | 20084 | 20099 | CATAGTGCTAGACTGT | 78 | 3820 |
| 1211295 | N/A | N/A | 21238 | 21253 | CCAACCTTGGTGCTGA | 38 | 3821 |
| 1211323 | N/A | N/A | 21917 | 21932 | GCCAGGTTATTAGCAC | 71 | 3822 |
| 1211349 | N/A | N/A | 22749 | 22764 | GCTCCCCAATCAGAGC | 169 | 3823 |
| 1211397 | N/A | N/A | 24993 | 25008 | TATAGAGAGCCACATG | 104 | 3824 |
| 1211425 | N/A | N/A | 26399 | 26414 | CGAGACCTCACATACA | 45 | 3825 |
| 1211473 | N/A | N/A | 27590 | 27605 | ACAACCCGTATTTTTT | 29 | 3826 |
| 1211501 | N/A | N/A | 28564 | 28579 | GACTTGGATGCACCCC | 6 | 3827 |
| 1211535 | N/A | N/A | 29153 | 29168 | GGAGACCTCTCATGTG | 73 | 3828 |
| 1211563 | N/A | N/A | 29734 | 29749 | GTGGTTAATCATTTAC | 54 | 3829 |
| 1211591 | N/A | N/A | 30343 | 30358 | AGTACCTCACTATATT | 93 | 3830 |
| 1211618 | N/A | N/A | 30991 | 31006 | AAATGTGGACCAACAG | 27 | 3831 |
| 1211643 | N/A | N/A | 31472 | 31487 | CGGGCATGCACGCTTG | 147 | 3832 |
| 1211671 | N/A | N/A | 32296 | 32311 | CCATCCCACAACTATT | 52 | 3833 |
| 1211699 | N/A | N/A | 33243 | 33258 | CTTAAGCCACCTTTGA | 73 | 3834 |
| 1211727 | N/A | N/A | 33638 | 33653 | TACTTTGGTAACCTCG | 5 | 3835 |
| 1211755 | N/A | N/A | 34112 | 34127 | TAGGCTGATTAGCTCA | 85 | 3836 |
| 1211783 | N/A | N/A | 34427 | 34442 | AGGTCAAAGGAAGTAG | 40 | 3837 |
| 1211811 | N/A | N/A | 34777 | 34792 | GGAGATGTATCACCAG | 41 | 3838 |
| 1211839 | N/A | N/A | 35202 | 35217 | CTGACTAAGAGGAGAT | 139 | 3839 |
| 1211867 | N/A | N/A | 35560 | 35575 | ATTGTTGATTGCAGAA | 10 | 3840 |
| 1211895 | N/A | N/A | 35897 | 35912 | GTGGGATTCATGCAGT | 45 | 3841 |
| 1211923 | N/A | N/A | 36396 | 36411 | CCTAACAGAGTTGCCA | 52 | 3842 |
| 1211951 | N/A | N/A | 36827 | 36842 | CAATTGCTGGGTAGGA | 42 | 3843 |

TABLE 61
Percent control of human PMP22 RNA with 3-10-3 cEt gapmers

| | SEQ | SEQ | SEQ | SEQ | | | |
|---|---|---|---|---|---|---|---|
| | ID | ID | ID | ID | | | |
| | NO: 1 | NO: 1 | NO: 2 | NO: 2 | | PMP22 | SEQ |
| Compound | Start | Stop | Start | Stop | Sequence | (% | ID |
| ID | Site | Site | Site | Site | (5′ to 3′) | UTC) | NO |
| 684267 | 864 | 879 | 37227 | 37242 | ATCTTCAATCAACAGC | 17 | 30 |
| 684394 | 1489 | 1504 | 37852 | 37867 | ATTATTCAGGTCTCCA | 15 | 31 |
| 684394 | 1489 | 1504 | 37852 | 37867 | ATTATTCAGGTCTCCA | 13 | 31 |
| 1120803 | N/A | N/A | 28806 | 28821 | TTCCTGTTGATACGCC | 47 | 3844 |
| 1205248 | N/A | N/A | 27020 | 27035 | TAGATTTTCACCTAAG | 107 | 3845 |
| 1205284 | N/A | N/A | 30480 | 30495 | ATAATACATGGTGCAA | 14 | 3846 |
| 1205300 | 687 | 702 | 37050 | 37065 | ATCACATAGATGACAC | 70 | 3847 |
| 1209882 | N/A | N/A | 4278 | 4293 | TTGTATATTCTTACGG | 101 | 3848 |
| 1209910 | N/A | N/A | 8652 | 8667 | CGTTTTATGACTTAAA | 99 | 3849 |
| 1209938 | N/A | N/A | 11038 | 11053 | TTTAGATTAAGCCTGA | 64 | 3850 |
| 1209966 | N/A | N/A | 14896 | 14911 | GATTTTAAACTCACCC | 58 | 3851 |
| 1209994 | N/A | N/A | 15873 | 15888 | TGTAAAACATGAACCC | 44 | 3852 |
| 1210022 | N/A | N/A | 19230 | 19245 | GGTAATTCACAATGTA | 12 | 3853 |
| 1210050 | N/A | N/A | 21476 | 21491 | GTTCTATTTAGATCAA | 67 | 3854 |
| 1210078 | N/A | N/A | 23257 | 23272 | GTATAGACATCCACAG | 73 | 3855 |
| 1210107 | N/A | N/A | 23994 | 24009 | AGACAATACATAGTGT | 58 | 3856 |
| 1210135 | N/A | N/A | 26228 | 26243 | TCTCGAATCAAATCAG | 29 | 3857 |
| 1210163 | N/A | N/A | 26949 | 26964 | CAACTAGTCCAGCTCC | 54 | 3858 |
| 1210191 | N/A | N/A | 28944 | 28959 | ACTTTGCTAGTTCTTA | 84 | 3859 |
| 1210220 | N/A | N/A | 29872 | 29887 | AGTCATTTAACAGAGC | 28 | 3860 |
| 1210248 | N/A | N/A | 30593 | 30608 | TATCCCAAGGAGCCCA | 131 | 3861 |
| 1210276 | N/A | N/A | 32363 | 32378 | ACAGTTTAATGGCTAT | 42 | 3862 |
| 1210304 | N/A | N/A | 34623 | 34638 | GACAATACAAATGTGC | 72 | 3863 |
| 1210362 | N/A | N/A | 3206 | 3221 | CCCGGCTGGCCAAGGC | 121 | 3864 |
| 1210390 | N/A | N/A | 4184 | 4199 | GTACTTGTAAACACTG | 126 | 3865 |
| 1210418 | N/A | N/A | 4598 | 4613 | GCTGATTCATAGCCTC | 95 | 3866 |
| 1210446 | N/A | N/A | 4910 | 4925 | CGGTCCCCGCTATTAC | 120 | 3867 |
| 1210474 | N/A | N/A | 5240 | 5255 | GCGGCGACTTTTACTC | 123 | 3868 |
| 1210502 | N/A | N/A | 5760 | 5775 | ATAGACCATAAAGGCT | 108 | 3869 |
| 1210530 | N/A | N/A | 6177 | 6192 | GCTGGGATGACCTGTT | 117 | 3870 |
| 1210558 | N/A | N/A | 6392 | 6407 | GGACACGAACCCCAAC | 70 | 3871 |
| 1210586 | N/A | N/A | 6679 | 6694 | CTCCGCATTCCGTTTG | 77 | 3872 |
| 1210614 | N/A | N/A | 7102 | 7117 | GCCCGCGCGGGTCAGG | 192 | 3873 |
| 1210642 | N/A | N/A | 7799 | 7814 | GACATGGGACCTGTGA | 81 | 3874 |
| 1210670 | N/A | N/A | 8691 | 8706 | ACCTAGCCACACCGCC | 78 | 3875 |
| 1210698 | N/A | N/A | 9139 | 9154 | GATCAGGAGGGCACTA | 113 | 3876 |
| 1210726 | N/A | N/A | 9327 | 9342 | AGTGAGCTAGCCCCAC | 109 | 3877 |
| 1210746 | N/A | N/A | 9596 | 9611 | ACCTAGTTGGTGCTTC | 50 | 3878 |
| 1210774 | N/A | N/A | 9984 | 9999 | CAACTGGATTATGCAA | 95 | 3879 |
| 1210800 | N/A | N/A | 10473 | 10488 | TTGTAACCACCAGGTG | 79 | 3880 |
| 1210828 | N/A | N/A | 10880 | 10895 | CACACTAAGGAGGCAT | 37 | 3881 |
| 1210856 | N/A | N/A | 11188 | 11203 | TTATTGTCTGCAGCCA | 13 | 3882 |
| 1210884 | N/A | N/A | 12001 | 12016 | GGGCCGGAGAGGCACT | 143 | 3883 |
| 1210912 | N/A | N/A | 12379 | 12394 | GCCCCTATCATTTGAA | 154 | 3884 |
| 1210940 | N/A | N/A | 13004 | 13019 | TATACCTGGAGAGGTG | 139 | 3885 |
| 1210968 | N/A | N/A | 13808 | 13823 | TTAAGACCAATGAACG | 98 | 3886 |
| 1210996 | N/A | N/A | 14237 | 14252 | TCTGTATGGAACCTCC | 43 | 3887 |
| 1211024 | N/A | N/A | 14736 | 14751 | CTCTCTTAATCAAGGC | 62 | 3888 |
| 1211052 | N/A | N/A | 15388 | 15403 | ATTACAGGAAAGCTCA | 27 | 3889 |
| 1211080 | N/A | N/A | 15981 | 15996 | TCCCTTGTACCACCAG | 46 | 3890 |
| 1211108 | N/A | N/A | 16678 | 16693 | ACTACCCATAGTGATG | 92 | 3891 |
| 1211134 | N/A | N/A | 17386 | 17401 | TCAGTTACACACCAGT | 0.4 | 3892 |
| 1211161 | N/A | N/A | 18567 | 18582 | CAGACTACTAGTTTTT | 80 | 3893 |
| 1211189 | N/A | N/A | 18855 | 18870 | GCCCGTTTACAAGCAC | 106 | 3894 |
| 1211213 | N/A | N/A | 19096 | 19111 | TTGGCCATAGAAAATG | 80 | 3895 |
| 1211240 | N/A | N/A | 19598 | 19613 | CAAGGTATTCCAGCTA | 36 | 3896 |
| 1211268 | N/A | N/A | 20096 | 20111 | ACCTCCCATTTGCATA | 102 | 3897 |
| 1211296 | N/A | N/A | 21242 | 21257 | ATATCCAACCTTGGTG | 101 | 3898 |
| 1211324 | N/A | N/A | 22292 | 22307 | TCACACCAAGCAGTAT | 74 | 3899 |
| 1211350 | N/A | N/A | 22828 | 22843 | GCAAGATTCAAGAGCT | 98 | 3900 |
| 1211377 | N/A | N/A | 23939 | 23954 | TTCGCATCATTAACAA | 54 | 3901 |
| 1211398 | N/A | N/A | 25054 | 25069 | GATAATTCCTCGGATT | 85 | 3902 |
| 1211426 | N/A | N/A | 26408 | 26423 | AAACTACTACGAGACC | 95 | 3903 |
| 1211474 | N/A | N/A | 27595 | 27610 | CTTGGACAACCCGTAT | 68 | 3904 |
| 1211502 | N/A | N/A | 28570 | 28585 | TCCGCAGACTTGGATG | 100 | 3905 |
| 1211536 | N/A | N/A | 29156 | 29171 | TAAGGAGACCTCTCAT | 103 | 3906 |
| 1211564 | N/A | N/A | 29855 | 29870 | AGCAACCATCCAGGAG | 149 | 3907 |
| 1211619 | N/A | N/A | 31037 | 31052 | CTGCTATTACAGCTCA | 72 | 3908 |
| 1211644 | N/A | N/A | 31474 | 31489 | GCCGGGCATGCACGCT | 106 | 3909 |
| 1211672 | N/A | N/A | 32302 | 32317 | GTGGATCCATCCCACA | 123 | 3910 |
| 1211700 | N/A | N/A | 33246 | 33261 | TGACTTAAGCCACCTT | 32 | 3911 |
| 1211728 | N/A | N/A | 33643 | 33658 | AAGTGTACTTTGGTAA | 83 | 3912 |
| 1211756 | N/A | N/A | 34123 | 34138 | CTCTCATATAATAGGC | 128 | 3913 |
| 1211784 | N/A | N/A | 34474 | 34489 | GAGTGATTAGAGCCCA | 45 | 3914 |
| 1211812 | N/A | N/A | 34784 | 34799 | AGTAGGTGGAGATGTA | 79 | 3915 |
| 1211840 | N/A | N/A | 35210 | 35225 | CGATTTCACTGACTAA | 72 | 3916 |
| 1211868 | N/A | N/A | 35562 | 35577 | TAATTGTTGATTGCAG | 34 | 3917 |
| 1211896 | N/A | N/A | 35900 | 35915 | CGTGTGGGATTCATGC | 85 | 3918 |
| 1211924 | N/A | N/A | 36399 | 36414 | CCCCCTAACAGAGTTG | 102 | 3919 |
| 1211952 | N/A | N/A | 36832 | 36847 | GCTGACAATTGCTGGG | 104 | 3920 |

TABLE 62
Percent control of human PMP22 RNA with 3-10-3 cEt gapmers

| | SEQ | SEQ | SEQ | SEQ | | | |
|---|---|---|---|---|---|---|---|
| | ID | ID | ID | ID | | | |
| | NO: 1 | NO: 1 | NO: 2 | NO: 2 | | PMP22 | SEQ |
| Compound | Start | Stop | Start | Stop | | (% | ID |
| ID | Site | Site | Site | Site | Sequence (5′ to 3′) | UTC) | NO |
| 684267 | 864 | 879 | 37227 | 37242 | ATCTTCAATCAACAGC | 10 | 30 |
| 684394 | 1489 | 1504 | 37852 | 37867 | ATTATTCAGGTCTCCA | 7 | 31 |
| 684394 | 1489 | 1504 | 37852 | 37867 | ATTATTCAGGTCTCCA | 8 | 31 |
| 1120804 | N/A | N/A | 28807 | 28822 | ATTCCTGTTGATACGC | 23 | 3921 |
| 1205187 | N/A | N/A | 23942 | 23957 | TAGTTCGCATCATTAA | 39 | 3922 |
| 1205249 | N/A | N/A | 27022 | 27037 | CCTAGATTTTCACCTA | 48 | 3923 |
| 1209883 | N/A | N/A | 4279 | 4294 | ATTGTATATTCTTACG | 107 | 3924 |
| 1209911 | N/A | N/A | 8778 | 8793 | ATAGATATCCTGAGTC | 115 | 3925 |
| 1209939 | N/A | N/A | 11093 | 11108 | GGAAGATAGCGGCAGA | 10 | 3926 |
| 1209967 | N/A | N/A | 14985 | 15000 | GATATTTGGATCTTGG | 1 | 3927 |
| 1209995 | N/A | N/A | 15891 | 15906 | GCCACGAAGATTTTAA | 68 | 3928 |
| 1210023 | N/A | N/A | 19248 | 19263 | ATATCAATCTCCCTCC | 79 | 3929 |
| 1210051 | N/A | N/A | 21487 | 21502 | ATTACAAACCTGTTCT | 92 | 3930 |
| 1210079 | N/A | N/A | 23272 | 23287 | AAACTATGTAATTGCG | 47 | 3931 |
| 1210108 | N/A | N/A | 24037 | 24052 | GATAATACACAACATC | 50 | 3932 |
| 1210136 | N/A | N/A | 26229 | 26244 | TTCTCGAATCAAATCA | 49 | 3933 |
| 1210164 | N/A | N/A | 26952 | 26967 | GATCAACTAGTCCAGC | 98 | 3934 |
| 1210192 | N/A | N/A | 28950 | 28965 | ATAACTACTTTGCTAG | 75 | 3935 |
| 1210221 | N/A | N/A | 29880 | 29895 | GCATAATTAGTCATTT | 34 | 3936 |
| 1210249 | N/A | N/A | 30594 | 30609 | CTATCCCAAGGAGCCC | 109 | 3937 |
| 1210277 | N/A | N/A | 32385 | 32400 | AAACCTTACAGTGGGA | 40 | 3938 |
| 1210305 | N/A | N/A | 34907 | 34922 | AAGGATGATTCTTTGG | 35 | 3939 |
| 1210332 | 1408 | 1423 | 37771 | 37786 | TAAGGAATGGTAAATC | 53 | 3940 |
| 1210363 | N/A | N/A | 3232 | 3247 | GCTGACCAGGCTTGCC | 120 | 3941 |
| 1210391 | N/A | N/A | 4188 | 4203 | AAGTGTACTTGTAAAC | 67 | 3942 |
| 1210419 | N/A | N/A | 4643 | 4658 | GCGAGGTGGCCATTTG | 137 | 3943 |
| 1210447 | N/A | N/A | 4912 | 4927 | GCCGGTCCCCGCTATT | 141 | 3944 |
| 1210475 | N/A | N/A | 5242 | 5257 | CCGCGGCGACTTTTAC | 134 | 3945 |
| 1210503 | N/A | N/A | 5763 | 5778 | CTTATAGACCATAAAG | 142 | 3946 |
| 1210531 | N/A | N/A | 6213 | 6228 | CCTCGCCCCTCATTTT | 152 | 3947 |
| 1210559 | N/A | N/A | 6394 | 6409 | CAGGACACGAACCCCA | 89 | 3948 |
| 1210587 | N/A | N/A | 6681 | 6696 | CTCTCCGCATTCCGTT | 118 | 3949 |
| 1210615 | N/A | N/A | 7104 | 7119 | CCGCCCGCGCGGGTCA | 140 | 3950 |
| 1210643 | N/A | N/A | 7804 | 7819 | AAGCCGACATGGGACC | 98 | 3951 |
| 1210671 | N/A | N/A | 8693 | 8708 | CCACCTAGCCACACCG | 89 | 3952 |
| 1210699 | N/A | N/A | 9145 | 9160 | CTAAGTGATCAGGAGG | 11 | 3953 |
| 1210727 | N/A | N/A | 9339 | 9354 | AACTGACGGTGCAGTG | 70 | 3954 |
| 1210747 | N/A | N/A | 9598 | 9613 | GTACCTAGTTGGTGCT | 145 | 3955 |
| 1210775 | N/A | N/A | 10021 | 10036 | CTGGGTACTGAGCTGT | 13 | 3956 |
| 1210801 | N/A | N/A | 10476 | 10491 | TACTTGTAACCACCAG | 31 | 3957 |
| 1210829 | N/A | N/A | 10907 | 10922 | GGAAAGCAACGAGGCA | 18 | 3958 |
| 1210857 | N/A | N/A | 11192 | 11207 | CAGCTTATTGTCTGCA | 62 | 3959 |
| 1210885 | N/A | N/A | 12013 | 12028 | CTTGTATTCCCTGGGC | 48 | 3960 |
| 1210913 | N/A | N/A | 12381 | 12396 | AAGCCCCTATCATTTG | 42 | 3961 |
| 1210941 | N/A | N/A | 13007 | 13022 | ACTTATACCTGGAGAG | 66 | 3962 |
| 1210969 | N/A | N/A | 13811 | 13826 | AGATTAAGACCAATGA | 67 | 3963 |
| 1210997 | N/A | N/A | 14246 | 14261 | GACGGTCCTTCTGTAT | 103 | 3964 |
| 1211025 | N/A | N/A | 14741 | 14756 | CTCCACTCTCTTAATC | 97 | 3965 |
| 1211053 | N/A | N/A | 15426 | 15441 | CTTAGACAATGGAGGT | 26 | 3966 |
| 1211081 | N/A | N/A | 15983 | 15998 | CCTCCCTTGTACCACC | 50 | 3967 |
| 1211109 | N/A | N/A | 16680 | 16695 | CCACTACCCATAGTGA | 115 | 3968 |
| 1211135 | N/A | N/A | 17388 | 17403 | ATTCAGTTACACACCA | 20 | 3969 |
| 1211162 | N/A | N/A | 18569 | 18584 | CCCAGACTACTAGTTT | 51 | 3970 |
| 1211190 | N/A | N/A | 18862 | 18877 | AACCAATGCCCGTTTA | 88 | 3971 |
| 1211214 | N/A | N/A | 19098 | 19113 | GTTTGGCCATAGAAAA | 51 | 3972 |
| 1211241 | N/A | N/A | 19646 | 19661 | GCCACTAGTGGGCACA | 59 | 3973 |
| 1211269 | N/A | N/A | 20102 | 20117 | ATTAACACCTCCCATT | 119 | 3974 |
| 1211297 | N/A | N/A | 21245 | 21260 | CCAATATCCAACCTTG | 38 | 3975 |
| 1211325 | N/A | N/A | 22342 | 22357 | ATTTACAGGCTGTTAT | 110 | 3976 |
| 1211351 | N/A | N/A | 22840 | 22855 | CAAAAGGCTGGTGCAA | 93 | 3977 |
| 1211399 | N/A | N/A | 25056 | 25071 | CAGATAATTCCTCGGA | 47 | 3978 |
| 1211427 | N/A | N/A | 26434 | 26449 | CCCCGCGCCCCTGTCA | 121 | 3979 |
| 1211475 | N/A | N/A | 27630 | 27645 | AAGGTATGCTCTCTAT | 48 | 3980 |
| 1211503 | N/A | N/A | 28573 | 28588 | CATTCCGCAGACTTGG | 40 | 3981 |
| 1211537 | N/A | N/A | 29168 | 29183 | TAGGCAGGAGATTAAG | 112 | 3982 |
| 1211565 | N/A | N/A | 29888 | 29903 | ATCTCCTTGCATAATT | 44 | 3983 |
| 1211592 | N/A | N/A | 30482 | 30497 | GAATAATACATGGTGC | 19 | 3984 |
| 1211620 | N/A | N/A | 31077 | 31092 | CAACGGAGGACAGGAC | 31 | 3985 |
| 1211645 | N/A | N/A | 31476 | 31491 | TTGCCGGGCATGCACG | 131 | 3986 |
| 1211673 | N/A | N/A | 32313 | 32328 | TCACCTAGGCAGTGGA | 125 | 3987 |
| 1211701 | N/A | N/A | 33281 | 33296 | ATCCGTCCCTAACAAA | 51 | 3988 |
| 1211729 | N/A | N/A | 33695 | 33710 | GTAGCTAACAGTATTG | 88 | 3989 |
| 1211757 | N/A | N/A | 34132 | 34147 | CCACACGGACTCTCAT | 105 | 3990 |
| 1211785 | N/A | N/A | 34477 | 34492 | TGAGAGTGATTAGAGC | 49 | 3991 |
| 1211813 | N/A | N/A | 34791 | 34806 | AGCAACCAGTAGGTGG | 51 | 3992 |
| 1211841 | N/A | N/A | 35212 | 35227 | CCCGATTTCACTGACT | 43 | 3993 |
| 1211869 | N/A | N/A | 35568 | 35583 | GCGGGTTAATTGTTGA | 57 | 3994 |
| 1211897 | N/A | N/A | 35907 | 35922 | AGTATGCCGTGTGGGA | 14 | 3995 |
| 1211925 | N/A | N/A | 36406 | 36421 | CTATGGTCCCCCTAAC | 98 | 3996 |
| 1211953 | N/A | N/A | 36842 | 36857 | CACCCCGGATGCTGAC | 94 | 3997 |

TABLE 63
Percent control of human PMP22 RNA with 3-10-3 cEt gapmers

| | SEQ | SEQ | SEQ | SEQ | | | |
|---|---|---|---|---|---|---|---|
| | ID | ID | ID | ID | | | |
| | NO: 1 | NO: 1 | NO: 2 | NO: 2 | | PMP22 | SEQ |
| Compound | Start | Stop | Start | Stop | | (% | ID |
| ID | Site | Site | Site | Site | Sequence (5′ to 3′) | UTC) | NO |
| 684267 | 864 | 879 | 37227 | 37242 | ATCTTCAATCAACAGC | 16 | 30 |
| 684394 | 1489 | 1504 | 37852 | 37867 | ATTATTCAGGTCTCCA | 10 | 31 |
| 684394 | 1489 | 1504 | 37852 | 37867 | ATTATTCAGGTCTCCA | 7 | 31 |
| 1120805 | N/A | N/A | 28808 | 28823 | CATTCCTGTTGATACG | 32 | 3998 |
| 1205190 | N/A | N/A | 23946 | 23961 | TCTCTAGTTCGCATCA | 46 | 3999 |
| 1205252 | N/A | N/A | 27032 | 27047 | GTTAACTGTTCCTAGA | 108 | 4000 |
| 1209884 | N/A | N/A | 4307 | 4322 | GATTTGAAAGGAGCTG | 125 | 4001 |
| 1209912 | N/A | N/A | 8780 | 8795 | AGATAGATATCCTGAG | 128 | 4002 |
| 1209940 | N/A | N/A | 11142 | 11157 | GAGGATTCGCCACTTA | 83 | 4003 |
| 1209968 | N/A | N/A | 14986 | 15001 | TGATATTTGGATCTTG | 14 | 4004 |
| 1209996 | N/A | N/A | 15942 | 15957 | TGTAAAATCCAGAGCC | 29 | 4005 |
| 1210024 | N/A | N/A | 19263 | 19278 | ATTGTACGATGAAGGA | 7 | 4006 |
| 1210052 | N/A | N/A | 21538 | 21553 | AAAATAATGATTCGAG | 43 | 4007 |
| 1210080 | N/A | N/A | 23322 | 23337 | AGAGTAAGGTGCACAC | 37 | 4008 |
| 1210109 | N/A | N/A | 24066 | 24081 | ACTTTGGAAGCATACA | 16 | 4009 |
| 1210137 | N/A | N/A | 26233 | 26248 | TTATTTCTCGAATCAA | 75 | 4010 |
| 1210165 | N/A | N/A | 27011 | 27026 | ACCTAAGATGTTTCCA | 38 | 4011 |
| 1210193 | N/A | N/A | 28954 | 28969 | CCTGATAACTACTTTG | 21 | 4012 |
| 1210222 | N/A | N/A | 29894 | 29909 | AATGATATCTCCTTGC | 16 | 4013 |
| 1210250 | N/A | N/A | 30608 | 30623 | GATGAAGGTACTGGCT | 30 | 4014 |
| 1210278 | N/A | N/A | 32496 | 32511 | ATAGATGGCTATAGGT | 23 | 4015 |
| 1210306 | N/A | N/A | 34932 | 34947 | AATAGATGTACCCTGA | 49 | 4016 |
| 1210333 | 1527 | 1542 | 37890 | 37905 | GGTACAAAAGCAGTTA | 17 | 4017 |
| 1210364 | N/A | N/A | 3256 | 3271 | CAGAGGAAGTGCTACT | 120 | 4018 |
| 1210392 | N/A | N/A | 4208 | 4223 | CGTGTTATCAGATTAA | 93 | 4019 |
| 1210420 | N/A | N/A | 4704 | 4719 | GCAGTCGGGCTTGGCT | 174 | 4020 |
| 1210448 | N/A | N/A | 4914 | 4929 | GCGCCGGTCCCCGCTA | 106 | 4021 |
| 1210476 | N/A | N/A | 5246 | 5261 | AAAACCGCGGCGACTT | 179 | 4022 |
| 1210504 | N/A | N/A | 5767 | 5782 | AGGTCTTATAGACCAT | 90 | 4023 |
| 1210532 | N/A | N/A | 6219 | 6234 | TGCGGTCCTCGCCCCT | 119 | 4024 |
| 1210560 | N/A | N/A | 6452 | 6467 | TTGCGCTAGACCCACG | 120 | 4025 |
| 1210588 | N/A | N/A | 6716 | 6731 | CAGCGGCGAGGAGGCT | 184 | 4026 |
| 1210616 | N/A | N/A | 7110 | 7125 | GCCCGACCGCCCGCGC | 112 | 4027 |
| 1210644 | N/A | N/A | 7810 | 7825 | GCCATAAAGCCGACAT | 73 | 4028 |
| 1210672 | N/A | N/A | 8700 | 8715 | CCCGCATCCACCTAGC | 158 | 4029 |
| 1210700 | N/A | N/A | 9148 | 9163 | ATCCTAAGTGATCAGG | 92 | 4030 |
| 1210728 | N/A | N/A | 9342 | 9357 | TGTAACTGACGGTGCA | 89 | 4031 |
| 1210748 | N/A | N/A | 9600 | 9615 | GGGTACCTAGTTGGTG | 77 | 4032 |
| 1210776 | N/A | N/A | 10035 | 10050 | ATGCTTGGGTATTACT | 8 | 4033 |
| 1210802 | N/A | N/A | 10486 | 10501 | GCTGAGTCACTACTTG | 143 | 4034 |
| 1210830 | N/A | N/A | 10910 | 10925 | CACGGAAAGCAACGAG | 72 | 4035 |
| 1210858 | N/A | N/A | 11256 | 11271 | GTTCGCAATGAGCATA | 11 | 4036 |
| 1210886 | N/A | N/A | 12018 | 12033 | AGATCCTTGTATTCCC | 19 | 4037 |
| 1210914 | N/A | N/A | 12385 | 12400 | ACTTAAGCCCCTATCA | 89 | 4038 |
| 1210942 | N/A | N/A | 13009 | 13024 | TTACTTATACCTGGAG | 15 | 4039 |
| 1210970 | N/A | N/A | 13843 | 13858 | TCCGATGGGCCTTGTT | 32 | 4040 |
| 1210998 | N/A | N/A | 14249 | 14264 | CTTGACGGTCCTTCTG | 42 | 4041 |
| 1211026 | N/A | N/A | 14785 | 14800 | TCATTCAAAGCGACGC | 71 | 4042 |
| 1211054 | N/A | N/A | 15429 | 15444 | GCCCTTAGACAATGGA | 164 | 4043 |
| 1211082 | N/A | N/A | 15989 | 16004 | TCTGTACCTCCCTTGT | 48 | 4044 |
| 1211110 | N/A | N/A | 16692 | 16707 | GCAGAGCATGTTCCAC | 86 | 4045 |
| 1211136 | N/A | N/A | 17435 | 17450 | CCCGCAAATCTTCTGT | 92 | 4046 |
| 1211163 | N/A | N/A | 18584 | 18599 | AAGGATTCCCTGATGC | 116 | 4047 |
| 1211191 | N/A | N/A | 18882 | 18897 | TACCCCCACCAGTGAC | 61 | 4048 |
| 1211215 | N/A | N/A | 19102 | 19117 | CTGAGTTTGGCCATAG | 27 | 4049 |
| 1211242 | N/A | N/A | 19670 | 19685 | TAGCTAGAGCAAAGCC | 81 | 4050 |
| 1211270 | N/A | N/A | 20115 | 20130 | GAGGCAAAGAGTTATT | 172 | 4051 |
| 1211298 | N/A | N/A | 21259 | 21274 | GTGGAAGTTTTAAGCC | 28 | 4052 |
| 1211326 | N/A | N/A | 22356 | 22371 | CAGGGTAAACAAGCAT | 38 | 4053 |
| 1211352 | N/A | N/A | 22904 | 22919 | CAAGGACAGCGAGAGG | 82 | 4054 |
| 1211400 | N/A | N/A | 25145 | 25160 | TAGGCTCAACATATAC | 56 | 4055 |
| 1211428 | N/A | N/A | 26436 | 26451 | AACCCCGCGCCCCTGT | 110 | 4056 |
| 1211476 | N/A | N/A | 27681 | 27696 | TTAGAGCCCAAAGTAA | 86 | 4057 |
| 1211504 | N/A | N/A | 28578 | 28593 | CTAATCATTCCGCAGA | 68 | 4058 |
| 1211538 | N/A | N/A | 29188 | 29203 | GAGGGAACTTGAAGAC | 93 | 4059 |
| 1211566 | N/A | N/A | 29891 | 29906 | GATATCTCCTTGCATA | 131 | 4060 |
| 1211593 | N/A | N/A | 30523 | 30538 | ATAGTACAGGCTTGTA | 22 | 4061 |
| 1211621 | N/A | N/A | 31087 | 31102 | CTGGGATTAACAACGG | 39 | 4062 |
| 1211646 | N/A | N/A | 31483 | 31498 | GAGGCATTTGCCGGGC | 117 | 4063 |
| 1211674 | N/A | N/A | 32315 | 32330 | AGTCACCTAGGCAGTG | 112 | 4064 |
| 1211702 | N/A | N/A | 33285 | 33300 | AATCATCCGTCCCTAA | 67 | 4065 |
| 1211730 | N/A | N/A | 33702 | 33717 | AGAGTAAGTAGCTAAC | 120 | 4066 |
| 1211758 | N/A | N/A | 34138 | 34153 | GAGAAGCCACACGGAC | 94 | 4067 |
| 1211786 | N/A | N/A | 34479 | 34494 | CATGAGAGTGATTAGA | 72 | 4068 |
| 1211814 | N/A | N/A | 34817 | 34832 | GTAAGTGGACTGTGAC | 25 | 4069 |
| 1211842 | N/A | N/A | 35215 | 35230 | CTCCCCGATTTCACTG | 105 | 4070 |
| 1211870 | N/A | N/A | 35570 | 35585 | TTGCGGGTTAATTGTT | 32 | 4071 |
| 1211898 | N/A | N/A | 35909 | 35924 | CCAGTATGCCGTGTGG | 122 | 4072 |
| 1211926 | N/A | N/A | 36408 | 36423 | GCCTATGGTCCCCCTA | 78 | 4073 |
| 1211954 | N/A | N/A | 36844 | 36859 | GCCACCCCGGATGCTG | 81 | 4074 |

TABLE 64
Percent control of human PMP22 RNA with 3-10-3 cEt gapmers

| | SEQ | SEQ | SEQ | SEQ | | | |
|---|---|---|---|---|---|---|---|
| | ID | ID | ID | ID | | | |
| | NO: 1 | NO: 1 | NO: 2 | NO: 2 | | PMP22 | SEQ |
| Compound | Start | Stop | Start | Stop | | (% | ID |
| ID | Site | Site | Site | Site | Sequence (5′ to 3′) | UTC) | NO |
| 684267 | 864 | 879 | 37227 | 37242 | ATCTTCAATCAACAGC | 12 | 30 |
| 684394 | 1489 | 1504 | 37852 | 37867 | ATTATTCAGGTCTCCA | 10 | 31 |
| 684394 | 1489 | 1504 | 37852 | 37867 | ATTATTCAGGTCTCCA | 3 | 31 |
| 1120806 | N/A | N/A | 28809 | 28824 | TCATTCCTGTTGATAC | 35 | 4075 |
| 1205254 | N/A | N/A | 27035 | 27050 | TAGGTTAACTGTTCCT | 97 | 4076 |
| 1209885 | N/A | N/A | 4308 | 4323 | CGATTTGAAAGGAGCT | 108 | 4077 |
| 1209913 | N/A | N/A | 9210 | 9225 | TTAGCTATCATACCAC | 71 | 4078 |
| 1209941 | N/A | N/A | 11169 | 11184 | TTGTTAAACTCAATCA | 37 | 4079 |
| 1209969 | N/A | N/A | 14988 | 15003 | CTTGATATTTGGATCT | 27 | 4080 |
| 1209997 | N/A | N/A | 16114 | 16129 | TATAGATTCCAGGTCA | 41 | 4081 |
| 1210025 | N/A | N/A | 19310 | 19325 | TTGGAAGACTTACTCC | 60 | 4082 |
| 1210053 | N/A | N/A | 21539 | 21554 | GAAAATAATGATTCGA | 63 | 4083 |
| 1210081 | N/A | N/A | 23323 | 23338 | AAGAGTAAGGTGCACA | 61 | 4084 |
| 1210110 | N/A | N/A | 24163 | 24178 | TAGACATACAAAGCTT | 53 | 4085 |
| 1210138 | N/A | N/A | 26235 | 26250 | AGTTATTTCTCGAATC | 34 | 4086 |
| 1210166 | N/A | N/A | 27037 | 27052 | ATTAGGTTAACTGTTC | 21 | 4087 |
| 1210194 | N/A | N/A | 28955 | 28970 | ACCTGATAACTACTTT | 33 | 4088 |
| 1210223 | N/A | N/A | 29898 | 29913 | TAGAAATGATATCTCC | 13 | 4089 |
| 1210251 | N/A | N/A | 30634 | 30649 | CGAAACAGCTCAGCAG | 57 | 4090 |
| 1210279 | N/A | N/A | 32561 | 32576 | GTCTAGATTAATTTCT | 37 | 4091 |
| 1210307 | N/A | N/A | 34958 | 34973 | ATTACAAGATTGTCTG | 35 | 4092 |
| 1210334 | 1598 | 1613 | 37961 | 37976 | CCGTAAGAAAAATGTG | 62 | 4093 |
| 1210365 | N/A | N/A | 3319 | 3334 | CAGGTAAACCCAACCC | 104 | 4094 |
| 1210393 | N/A | N/A | 4267 | 4282 | TACGGTAAGTAAAAAT | 102 | 4095 |
| 1210421 | N/A | N/A | 4734 | 4749 | CGAATAAGCTCTAGGC | 113 | 4096 |
| 1210449 | N/A | N/A | 4918 | 4933 | CCCCGCGCCGGTCCCC | 93 | 4097 |
| 1210477 | N/A | N/A | 5251 | 5266 | CCTGCAAAACCGCGGC | 120 | 4098 |
| 1210505 | N/A | N/A | 5770 | 5785 | GTAAGGTCTTATAGAC | 81 | 4099 |
| 1210533 | N/A | N/A | 6222 | 6237 | TAATGCGGTCCTCGCC | 102 | 4100 |
| 1210561 | N/A | N/A | 6456 | 6471 | GCTCTTGCGCTAGACC | 108 | 4101 |
| 1210589 | N/A | N/A | 6740 | 6755 | AGCCGTGGCATGCGGT | 73 | 4102 |
| 1210617 | N/A | N/A | 7112 | 7127 | CAGCCCGACCGCCCGC | 123 | 4103 |
| 1210645 | N/A | N/A | 7812 | 7827 | ATGCCATAAAGCCGAC | 47 | 4104 |
| 1210673 | N/A | N/A | 8703 | 8718 | GCACCCGCATCCACCT | 95 | 4105 |
| 1210701 | N/A | N/A | 9158 | 9173 | AAAAAGCATTATCCTA | 69 | 4106 |
| 1210729 | N/A | N/A | 9345 | 9360 | CCATGTAACTGACGGT | 63 | 4107 |
| 1210749 | N/A | N/A | 9602 | 9617 | TTGGGTACCTAGTTGG | 30 | 4108 |
| 1210777 | N/A | N/A | 10054 | 10069 | TAATGCTTCAGCTGGG | 2 | 4109 |
| 1210803 | N/A | N/A | 10494 | 10509 | CTTTTCGGGCTGAGTC | 65 | 4110 |
| 1210831 | N/A | N/A | 10912 | 10927 | CTCACGGAAAGCAACG | 63 | 4111 |
| 1210859 | N/A | N/A | 11258 | 11273 | TGGTTCGCAATGAGCA | 15 | 4112 |
| 1210887 | N/A | N/A | 12020 | 12035 | CCAGATCCTTGTATTC | 29 | 4113 |
| 1210915 | N/A | N/A | 12433 | 12448 | CTACCTACTTCCAGAC | 66 | 4114 |
| 1210943 | N/A | N/A | 13011 | 13026 | ACTTACTTATACCTGG | 21 | 4115 |
| 1210971 | N/A | N/A | 13846 | 13861 | GATTCCGATGGGCCTT | 38 | 4116 |
| 1210999 | N/A | N/A | 14264 | 14279 | CCCAGCGATCTTGCAC | 75 | 4117 |
| 1211027 | N/A | N/A | 14825 | 14840 | GATTGTATGAGTTTGC | 2 | 4118 |
| 1211055 | N/A | N/A | 15431 | 15446 | CTGCCCTTAGACAATG | 148 | 4119 |
| 1211083 | N/A | N/A | 15999 | 16014 | CATTCCGTCCTCTGTA | 41 | 4120 |
| 1211111 | N/A | N/A | 16716 | 16731 | ATTGGATCACCCTATT | 84 | 4121 |
| 1211137 | N/A | N/A | 17438 | 17453 | CTTCCCGCAAATCTTC | 80 | 4122 |
| 1211164 | N/A | N/A | 18600 | 18615 | CCCGGTGCAGAAAAAC | 108 | 4123 |
| 1211192 | N/A | N/A | 18922 | 18937 | CACGCATTATGGAAAT | 43 | 4124 |
| 1211216 | N/A | N/A | 19103 | 19118 | ACTGAGTTTGGCCATA | 8 | 4125 |
| 1211243 | N/A | N/A | 19697 | 19712 | TCTCAACAGGTAATCC | 69 | 4126 |
| 1211271 | N/A | N/A | 20129 | 20144 | GAGGGTAAATCACAGA | 105 | 4127 |
| 1211299 | N/A | N/A | 21344 | 21359 | CTTATGTTGAGTACCT | 17 | 4128 |
| 1211327 | N/A | N/A | 22398 | 22413 | GATAGTGCAAATAACC | 61 | 4129 |
| 1211353 | N/A | N/A | 22908 | 22923 | TACACAAGGACAGCGA | 81 | 4130 |
| 1211378 | N/A | N/A | 23950 | 23965 | TAAATCTCTAGTTCGC | 15 | 4131 |
| 1211401 | N/A | N/A | 25149 | 25164 | GATGTAGGCTCAACAT | 78 | 4132 |
| 1211429 | N/A | N/A | 26438 | 26453 | TTAACCCCGCGCCCCT | 106 | 4133 |
| 1211477 | N/A | N/A | 27685 | 27700 | GCTGTTAGAGCCCAAA | 68 | 4134 |
| 1211505 | N/A | N/A | 28586 | 28601 | CTACTAAACTAATCAT | 126 | 4135 |
| 1211539 | N/A | N/A | 29228 | 29243 | TAGGACTCTGCACACT | 60 | 4136 |
| 1211567 | N/A | N/A | 29924 | 29939 | AGGGTAACTCTTCACT | 63 | 4137 |
| 1211594 | N/A | N/A | 30587 | 30602 | AAGGAGCCCATTCAAC | 85 | 4138 |
| 1211622 | N/A | N/A | 31089 | 31104 | GACTGGGATTAACAAC | 28 | 4139 |
| 1211647 | N/A | N/A | 31491 | 31506 | GCATTGGAGAGGCATT | 72 | 4140 |
| 1211675 | N/A | N/A | 32318 | 32333 | CAGAGTCACCTAGGCA | 105 | 4141 |
| 1211703 | N/A | N/A | 33287 | 33302 | ATAATCATCCGTCCCT | 36 | 4142 |
| 1211731 | N/A | N/A | 33739 | 33754 | CAGCGATGTCTCAGAA | 81 | 4143 |
| 1211759 | N/A | N/A | 34176 | 34191 | AGAGCATAGACGGGCG | 101 | 4144 |
| 1211787 | N/A | N/A | 34503 | 34518 | CTCCTTTAACAGTGAC | 77 | 4145 |
| 1211815 | N/A | N/A | 34823 | 34838 | CCCCTAGTAAGTGGAC | 111 | 4146 |
| 1211843 | N/A | N/A | 35217 | 35232 | TACTCCCCGATTTCAC | 87 | 4147 |
| 1211871 | N/A | N/A | 35574 | 35589 | ATCATTGCGGGTTAAT | 37 | 4148 |
| 1211899 | N/A | N/A | 35913 | 35928 | AAATCCAGTATGCCGT | 36 | 4149 |
| 1211927 | N/A | N/A | 36436 | 36451 | AGGATTAAGCTCCATG | 109 | 4150 |
| 1211955 | N/A | N/A | 36848 | 36863 | CTCCGCCACCCCGGAT | 118 | 4151 |

TABLE 65
Percent control of human PMP22 RNA with 3-10-3 cEt gapmers

| | SEQ | SEQ | SEQ | SEQ | | | |
|---|---|---|---|---|---|---|---|
| | ID | ID | ID | ID | | | |
| | NO: 1 | NO: 1 | NO: 2 | NO: 2 | | PMP22 | SEQ |
| Compound | Start | Stop | Start | Stop | | (% | ID |
| ID | Site | Site | Site | Site | Sequence (5′ to 3′) | UTC) | NO |
| 684267 | 864 | 879 | 37227 | 37242 | ATCTTCAATCAACAGC | 27 | 30 |
| 684394 | 1489 | 1504 | 37852 | 37867 | ATTATTCAGGTCTCCA | 13 | 31 |
| 684394 | 1489 | 1504 | 37852 | 37867 | ATTATTCAGGTCTCCA | 17 | 31 |
| 1120807 | N/A | N/A | 28810 | 28825 | TTCATTCCTGTTGATA | 73 | 4152 |
| 1209886 | N/A | N/A | 4310 | 4325 | TACGATTTGAAAGGAG | 105 | 4153 |
| 1209914 | N/A | N/A | 9341 | 9356 | GTAACTGACGGTGCAG | 46 | 4154 |
| 1209942 | N/A | N/A | 11170 | 11185 | ATTGTTAAACTCAATC | 91 | 4155 |
| 1209970 | N/A | N/A | 15069 | 15084 | CCAGTATTCTGACCCA | 17 | 4156 |
| 1209998 | N/A | N/A | 16120 | 16135 | AAAGACTATAGATTCC | 29 | 4157 |
| 1210026 | N/A | N/A | 19326 | 19341 | TCTCTAAGAATTGCTC | 22 | 4158 |
| 1210054 | N/A | N/A | 21540 | 21555 | AGAAAATAATGATTCG | 97 | 4159 |
| 1210082 | N/A | N/A | 23349 | 23364 | CTTTGAAAGGTCTCCA | 50 | 4160 |
| 1210111 | N/A | N/A | 24281 | 24296 | TATCATAGAAGTATGA | 121 | 4161 |
| 1210139 | N/A | N/A | 26237 | 26252 | TAAGTTATTTCTCGAA | 57 | 4162 |
| 1210167 | N/A | N/A | 27054 | 27069 | GAATTTTAAGGGTGCA | 17 | 4163 |
| 1210195 | N/A | N/A | 28976 | 28991 | ACCTATTGGTGGAAGA | 93 | 4164 |
| 1210224 | N/A | N/A | 29903 | 29918 | GTACCTAGAAATGATA | 47 | 4165 |
| 1210252 | N/A | N/A | 30635 | 30650 | CCGAAACAGCTCAGCA | 31 | 4166 |
| 1210280 | N/A | N/A | 32660 | 32675 | AGTTTTATTCAGGCTC | 25 | 4167 |
| 1210308 | N/A | N/A | 34960 | 34975 | TTATTACAAGATTGTC | 29 | 4168 |
| 1210344 | 516 | 531 | 28489 | 28504 | ATGTAAAACCTGCCCC | 103 | 4169 |
| 1210366 | N/A | N/A | 3325 | 3340 | GCCAGACAGGTAAACC | 87 | 4170 |
| 1210394 | N/A | N/A | 4269 | 4284 | CTTACGGTAAGTAAAA | 101 | 4171 |
| 1210422 | N/A | N/A | 4738 | 4753 | CCACCGAATAAGCTCT | 138 | 4172 |
| 1210450 | N/A | N/A | 4920 | 4935 | TGCCCCGCGCCGGTCC | 98 | 4173 |
| 1210478 | N/A | N/A | 5259 | 5274 | AGTCGGTCCCTGCAAA | 134 | 4174 |
| 1210506 | N/A | N/A | 5774 | 5789 | CCCTGTAAGGTCTTAT | 114 | 4175 |
| 1210534 | N/A | N/A | 6227 | 6242 | CCAAGTAATGCGGTCC | 144 | 4176 |
| 1210562 | N/A | N/A | 6497 | 6512 | GCGCGCTTCCCCAGGC | 141 | 4177 |
| 1210590 | N/A | N/A | 6749 | 6764 | CCTGGAGACAGCCGTG | 120 | 4178 |
| 1210618 | N/A | N/A | 7116 | 7131 | CCCGCAGCCCGACCGC | 131 | 4179 |
| 1210646 | N/A | N/A | 7833 | 7848 | TACTAACAATGTGTTG | 82 | 4180 |
| 1210674 | N/A | N/A | 8705 | 8720 | AAGCACCCGCATCCAC | 78 | 4181 |
| 1210702 | N/A | N/A | 9167 | 9182 | TTCAATCACAAAAAGC | 52 | 4182 |
| 1210730 | N/A | N/A | 9399 | 9414 | ATGCTAGGTGGCATCA | 73 | 4183 |
| 1210750 | N/A | N/A | 9606 | 9621 | TGCCTTGGGTACCTAG | 66 | 4184 |
| 1210778 | N/A | N/A | 10078 | 10093 | CTGTGGTTCAAGGAAT | 32 | 4185 |
| 1210804 | N/A | N/A | 10499 | 10514 | CTGCCCTTTTCGGGCT | 110 | 4186 |
| 1210832 | N/A | N/A | 10962 | 10977 | TGATTGTGAGAGCTGA | 15 | 4187 |
| 1210860 | N/A | N/A | 11349 | 11364 | CAAATCGATGTCAATA | 36 | 4188 |
| 1210888 | N/A | N/A | 12049 | 12064 | CGGGACCATCAAGGCA | 117 | 4189 |
| 1210916 | N/A | N/A | 12449 | 12464 | CCATACCTCTCTCAGG | 105 | 4190 |
| 1210944 | N/A | N/A | 13013 | 13028 | AGACTTACTTATACCT | 20 | 4191 |
| 1210972 | N/A | N/A | 13853 | 13868 | TCAGGTAGATTCCGAT | 65 | 4192 |
| 1211000 | N/A | N/A | 14289 | 14304 | TCAACTACGCCAAGCT | 77 | 4193 |
| 1211028 | N/A | N/A | 14827 | 14842 | CAGATTGTATGAGTTT | 8 | 4194 |
| 1211056 | N/A | N/A | 15439 | 15454 | TGCAGGTACTGCCCTT | 83 | 4195 |
| 1211084 | N/A | N/A | 16007 | 16022 | TGACAACACATTCCGT | 24 | 4196 |
| 1211112 | N/A | N/A | 16718 | 16733 | CCATTGGATCACCCTA | 34 | 4197 |
| 1211138 | N/A | N/A | 17443 | 17458 | TACACCTTCCCGCAAA | 83 | 4198 |
| 1211165 | N/A | N/A | 18602 | 18617 | GACCCGGTGCAGAAAA | 87 | 4199 |
| 1211193 | N/A | N/A | 18927 | 18942 | AAGAACACGCATTATG | 51 | 4200 |
| 1211217 | N/A | N/A | 19104 | 19119 | CACTGAGTTTGGCCAT | 34 | 4201 |
| 1211244 | N/A | N/A | 19707 | 19722 | TGGGCGGCTCTCTCAA | 111 | 4202 |
| 1211272 | N/A | N/A | 20186 | 20201 | GGACAGTTGCAAGAGT | 108 | 4203 |
| 1211300 | N/A | N/A | 21381 | 21396 | CCCCACCCAATTTGCA | 114 | 4204 |
| 1211328 | N/A | N/A | 22406 | 22421 | TGTTAAAGGATAGTGC | 53 | 4205 |
| 1211354 | N/A | N/A | 22922 | 22937 | CATTGATCAAAAGCTA | 125 | 4206 |
| 1211379 | N/A | N/A | 23986 | 24001 | CATAGTGTTGGCTATT | 80 | 4207 |
| 1211402 | N/A | N/A | 25155 | 25170 | AGAAATGATGTAGGCT | 42 | 4208 |
| 1211430 | N/A | N/A | 26440 | 26455 | CCTTAACCCCGCGCCC | 108 | 4209 |
| 1211450 | N/A | N/A | 27049 | 27064 | TTAAGGGTGCAAATTA | 67 | 4210 |
| 1211478 | N/A | N/A | 27696 | 27711 | TCACGGGAATGGCTGT | 90 | 4211 |
| 1211506 | N/A | N/A | 28589 | 28604 | CTTCTACTAAACTAAT | 119 | 4212 |
| 1211540 | N/A | N/A | 29355 | 29370 | GAGCTAATGTAAGATG | 104 | 4213 |
| 1211568 | N/A | N/A | 29927 | 29942 | GTAAGGGTAACTCTTC | 18 | 4214 |
| 1211595 | N/A | N/A | 30605 | 30620 | GAAGGTACTGGCTATC | 40 | 4215 |
| 1211623 | N/A | N/A | 31095 | 31110 | GATCTTGACTGGGATT | 93 | 4216 |
| 1211648 | N/A | N/A | 31528 | 31543 | CAGAGATTCTAGTGGT | 22 | 4217 |
| 1211676 | N/A | N/A | 32337 | 32352 | CCCAACCCTAAATGCA | 107 | 4218 |
| 1211704 | N/A | N/A | 33290 | 33305 | TCCATAATCATCCGTC | 39 | 4219 |
| 1211732 | N/A | N/A | 33741 | 33756 | CACAGCGATGTCTCAG | 45 | 4220 |
| 1211760 | N/A | N/A | 34179 | 34194 | CCAAGAGCATAGACGG | 79 | 4221 |
| 1211788 | N/A | N/A | 34513 | 34528 | AAGTCTTAAGCTCCTT | 86 | 4222 |
| 1211816 | N/A | N/A | 34827 | 34842 | AATACCCCTAGTAAGT | 86 | 4223 |
| 1211844 | N/A | N/A | 35224 | 35239 | GACCAGCTACTCCCCG | 72 | 4224 |
| 1211872 | N/A | N/A | 35578 | 35593 | CGAAATCATTGCGGGT | 44 | 4225 |
| 1211900 | N/A | N/A | 36029 | 36044 | TCCCCCCACAAGGAGG | 80 | 4226 |
| 1211928 | N/A | N/A | 36450 | 36465 | CACGCCATGGTAAAAG | 66 | 4227 |
| 1211956 | N/A | N/A | 36850 | 36865 | CTCTCCGCCACCCCGG | 114 | 4228 |

TABLE 66
Percent control of human PMP22 RNA with 3-10-3 cEt gapmers

| | SEQ | SEQ | SEQ | SEQ | | | |
|---|---|---|---|---|---|---|---|
| | ID | ID | ID | ID | | | |
| | NO: 1 | NO: 1 | NO: 2 | NO: 2 | | PMP22 | SEQ |
| Compound | Start | Stop | Start | Stop | | (% | ID |
| ID | Site | Site | Site | Site | Sequence (5′ to 3′) | UTC) | NO |
| 684267 | 864 | 879 | 37227 | 37242 | ATCTTCAATCAACAGC | 12 | 30 |
| 684394 | 1489 | 1504 | 37852 | 37867 | ATTATTCAGGTCTCCA | 11 | 31 |
| 684394 | 1489 | 1504 | 37852 | 37867 | ATTATTCAGGTCTCCA | 16 | 31 |
| 1205168 | N/A | N/A | 17490 | 17505 | AGTGATTTGCTGACCT | 14 | 4229 |
| 1205199 | N/A | N/A | 23990 | 24005 | AATACATAGTGTTGGC | 41 | 4230 |
| 1205269 | N/A | N/A | 28823 | 28838 | TCCAGATTGCAGTTTC | 12 | 4231 |
| 1205304 | 856 | 871 | 37219 | 37234 | TCAACAGCAACCCCCA | 14 | 4232 |
| 1209887 | N/A | N/A | 4311 | 4326 | TTACGATTTGAAAGGA | 53 | 4233 |
| 1209915 | N/A | N/A | 9448 | 9463 | AATAGCTTCAAGTCCC | 16 | 4234 |
| 1209943 | N/A | N/A | 11172 | 11187 | CAATTGTTAAACTCAA | 64 | 4235 |
| 1209971 | N/A | N/A | 15268 | 15283 | AGTTTATCAACTACCT | 60 | 4236 |
| 1209999 | N/A | N/A | 16238 | 16253 | AAAGATCAACATCCAC | 26 | 4237 |
| 1210027 | N/A | N/A | 19371 | 19386 | CTTGTTGGAAAACTCT | 46 | 4238 |
| 1210055 | N/A | N/A | 21560 | 21575 | GCAAAACAAGTCAGCT | 108 | 4239 |
| 1210084 | N/A | N/A | 23416 | 23431 | ATGGTATATCCTCACA | 53 | 4240 |
| 1210112 | N/A | N/A | 24446 | 24461 | ACCAATGAGTCAAGAT | 44 | 4241 |
| 1210140 | N/A | N/A | 26238 | 26253 | ATAAGTTATTTCTCGA | 50 | 4242 |
| 1210168 | N/A | N/A | 27055 | 27070 | AGAATTTTAAGGGTGC | 11 | 4243 |
| 1210196 | N/A | N/A | 28979 | 28994 | ACTACCTATTGGTGGA | 92 | 4244 |
| 1210225 | N/A | N/A | 29904 | 29919 | CGTACCTAGAAATGAT | 61 | 4245 |
| 1210253 | N/A | N/A | 30638 | 30653 | AAGCCGAAACAGCTCA | 112 | 4246 |
| 1210281 | N/A | N/A | 32661 | 32676 | TAGTTTTATTCAGGCT | 21 | 4247 |
| 1210309 | N/A | N/A | 34999 | 35014 | TATGATTGTTGTCATG | 94 | 4248 |
| 1210367 | N/A | N/A | 3358 | 3373 | ATAACCACCCAGGTCA | 105 | 4249 |
| 1210395 | N/A | N/A | 4274 | 4289 | ATATTCTTACGGTAAG | 95 | 4250 |
| 1210423 | N/A | N/A | 4742 | 4757 | ACTACCACCGAATAAG | 116 | 4251 |
| 1210451 | N/A | N/A | 4932 | 4947 | GCCGGACACACCTGCC | 95 | 4252 |
| 1210479 | N/A | N/A | 5261 | 5276 | AAAGTCGGTCCCTGCA | 100 | 4253 |
| 1210507 | N/A | N/A | 5803 | 5818 | CTATCCAGACACCAGC | 61 | 4254 |
| 1210535 | N/A | N/A | 6241 | 6256 | GCAGGACATTTATCCC | 120 | 4255 |
| 1210563 | N/A | N/A | 6499 | 6514 | CCGCGCGCTTCCCCAG | 113 | 4256 |
| 1210591 | N/A | N/A | 6764 | 6779 | GATTTCCGTCTGAGAC | 131 | 4257 |
| 1210619 | N/A | N/A | 7119 | 7134 | GCGCCCGCAGCCCGAC | 124 | 4258 |
| 1210647 | N/A | N/A | 7844 | 7859 | AGTGGAAGCTTTACTA | 110 | 4259 |
| 1210675 | N/A | N/A | 8707 | 8722 | AAAAGCACCCGCATCC | 138 | 4260 |
| 1210703 | N/A | N/A | 9177 | 9192 | CGATATTTTTTTCAAT | 94 | 4261 |
| 1210731 | N/A | N/A | 9405 | 9420 | GTTTTGATGCTAGGTG | 10 | 4262 |
| 1210751 | N/A | N/A | 9630 | 9645 | GCTGGGTGTTCCTTTC | 61 | 4263 |
| 1210779 | N/A | N/A | 10152 | 10167 | GCAGGGTTTTCTACTC | 69 | 4264 |
| 1210805 | N/A | N/A | 10578 | 10593 | CGGGCCCAAGAGTCCA | 155 | 4265 |
| 1210833 | N/A | N/A | 10965 | 10980 | CCCTGATTGTGAGAGC | 11 | 4266 |
| 1210861 | N/A | N/A | 11369 | 11384 | CACTTGCAACATATTC | 10 | 4267 |
| 1210889 | N/A | N/A | 12055 | 12070 | CAGGCTCGGGACCATC | 102 | 4268 |
| 1210917 | N/A | N/A | 12477 | 12492 | CTGCATCTCTGACAAT | 46 | 4269 |
| 1210945 | N/A | N/A | 13343 | 13358 | GAGAGGTCTGGACTCA | 123 | 4270 |
| 1210973 | N/A | N/A | 13863 | 13878 | AGTGGATCATTCAGGT | 35 | 4271 |
| 1211001 | N/A | N/A | 14317 | 14332 | CCCACTAGTCTGCCCT | 92 | 4272 |
| 1211029 | N/A | N/A | 14829 | 14844 | TCCAGATTGTATGAGT | 27 | 4273 |
| 1211057 | N/A | N/A | 15474 | 15489 | GCAGACCCACCTGTTG | 134 | 4274 |
| 1211085 | N/A | N/A | 16012 | 16027 | CATGTTGACAACACAT | 91 | 4275 |
| 1211113 | N/A | N/A | 16730 | 16745 | AGTGATGACTTTCCAT | 41 | 4276 |
| 1211166 | N/A | N/A | 18605 | 18620 | GCAGACCCGGTGCAGA | 89 | 4277 |
| 1211194 | N/A | N/A | 18965 | 18980 | ATAGAGTTCTCCTCCT | 91 | 4278 |
| 1211218 | N/A | N/A | 19105 | 19120 | ACACTGAGTTTGGCCA | 78 | 4279 |
| 1211245 | N/A | N/A | 19726 | 19741 | AAAGGCGATGAAGGTG | 32 | 4280 |
| 1211273 | N/A | N/A | 20263 | 20278 | CATATCAAGTCCCACT | 87 | 4281 |
| 1211301 | N/A | N/A | 21385 | 21400 | CACGCCCCACCCAATT | 97 | 4282 |
| 1211329 | N/A | N/A | 22409 | 22424 | CGCTGTTAAAGGATAG | 81 | 4283 |
| 1211355 | N/A | N/A | 22924 | 22939 | GCCATTGATCAAAAGC | 93 | 4284 |
| 1211403 | N/A | N/A | 25220 | 25235 | CACATGGGACAGCTTT | 43 | 4285 |
| 1211431 | N/A | N/A | 26442 | 26457 | ACCCTTAACCCCGCGC | 116 | 4286 |
| 1211451 | N/A | N/A | 27071 | 27086 | GTAAGCAGCTCATGGC | 37 | 4287 |
| 1211479 | N/A | N/A | 27701 | 27716 | AAAGATCACGGGAATG | 64 | 4288 |
| 1211507 | N/A | N/A | 28591 | 28606 | TCCTTCTACTAAACTA | 83 | 4289 |
| 1211541 | N/A | N/A | 29368 | 29383 | GACAGACATGTAAGAG | 39 | 4290 |
| 1211569 | N/A | N/A | 30003 | 30018 | AAACTAAAACGAGTGA | 83 | 4291 |
| 1211596 | N/A | N/A | 30697 | 30712 | TGAGTTTTGGCCTAAA | 16 | 4292 |
| 1211624 | N/A | N/A | 31101 | 31116 | TCAGATGATCTTGACT | 69 | 4293 |
| 1211649 | N/A | N/A | 31539 | 31554 | CGGAGACTACACAGAG | 27 | 4294 |
| 1211677 | N/A | N/A | 32355 | 32370 | ATGGCTATGTCAGTGG | 68 | 4295 |
| 1211705 | N/A | N/A | 33292 | 33307 | CATCCATAATCATCCG | 5 | 4296 |
| 1211733 | N/A | N/A | 33744 | 33759 | GAACACAGCGATGTCT | 74 | 4297 |
| 1211761 | N/A | N/A | 34193 | 34208 | ATGCACCAGATGCCCC | 40 | 4298 |
| 1211789 | N/A | N/A | 34567 | 34582 | GGGTAGGTCTGCAACA | 56 | 4299 |
| 1211817 | N/A | N/A | 34829 | 34844 | CAAATACCCCTAGTAA | 74 | 4300 |
| 1211845 | N/A | N/A | 35230 | 35245 | TGAGTGGACCAGCTAC | 70 | 4301 |
| 1211873 | N/A | N/A | 35582 | 35597 | GGAGCGAAATCATTGC | 56 | 4302 |
| 1211901 | N/A | N/A | 36064 | 36079 | CAAACTGATGGCCCCA | 76 | 4303 |
| 1211929 | N/A | N/A | 36453 | 36468 | AGTCACGCCATGGTAA | 48 | 4304 |
| 1211957 | N/A | N/A | 36857 | 36872 | CGGCCCCCTCTCCGCC | 88 | 4305 |

TABLE 67
Percent control of human PMP22 RNA with 3-10-3 cEt gapmers

| | SEQ | SEQ | SEQ | SEQ | | | |
|---|---|---|---|---|---|---|---|
| | ID | ID | ID | ID | | | |
| | NO: 1 | NO: 1 | NO: 2 | NO: 2 | | PMP22 | SEQ |
| Compound | Start | Stop | Start | Stop | | (% | ID |
| ID | Site | Site | Site | Site | Sequence (5′ to 3′) | UTC) | NO |
| 684267 | 864 | 879 | 37227 | 37242 | ATCTTCAATCAACAGC | 11 | 30 |
| 684394 | 1489 | 1504 | 37852 | 37867 | ATTATTCAGGTCTCCA | 7 | 31 |
| 684394 | 1489 | 1504 | 37852 | 37867 | ATTATTCAGGTCTCCA | 11 | 31 |
| 1205151 | N/A | N/A | 10232 | 10247 | AGATTAAGCACTGTTC | 9 | 4306 |
| 1209888 | N/A | N/A | 4321 | 4336 | CTATATTATTTTACGA | 107 | 4307 |
| 1209916 | N/A | N/A | 9564 | 9579 | TTAATTTGACCCTCAT | 52 | 4308 |
| 1209944 | N/A | N/A | 11189 | 11204 | CTTATTGTCTGCAGCC | 10 | 4309 |
| 1209972 | N/A | N/A | 15390 | 15405 | AGATTACAGGAAAGCT | 28 | 4310 |
| 1210000 | N/A | N/A | 16466 | 16481 | GTAATAAGTTCCCCAT | 36 | 4311 |
| 1210028 | N/A | N/A | 19401 | 19416 | ATAGTAAGCTGTCTGA | 26 | 4312 |
| 1210056 | N/A | N/A | 21588 | 21603 | AAGCTATTATCTGCCA | 57 | 4313 |
| 1210085 | N/A | N/A | 23417 | 23432 | TATGGTATATCCTCAC | 35 | 4314 |
| 1210113 | N/A | N/A | 24447 | 24462 | AACCAATGAGTCAAGA | 34 | 4315 |
| 1210141 | N/A | N/A | 26239 | 26254 | CATAAGTTATTTCTCG | 15 | 4316 |
| 1210169 | N/A | N/A | 27094 | 27109 | GTAAGATAAACTTGTT | 37 | 4317 |
| 1210197 | N/A | N/A | 29009 | 29024 | AAGGTGAGAATTTGTC | 20 | 4318 |
| 1210226 | N/A | N/A | 29925 | 29940 | AAGGGTAACTCTTCAC | 21 | 4319 |
| 1210254 | N/A | N/A | 30639 | 30654 | AAAGCCGAAACAGCTC | 78 | 4320 |
| 1210282 | N/A | N/A | 32662 | 32677 | ATAGTTTTATTCAGGC | 7 | 4321 |
| 1210310 | N/A | N/A | 35001 | 35016 | TATATGATTGTTGTCA | 114 | 4322 |
| 1210345 | 1467 | 1482 | 37830 | 37845 | CTTATGTTGTAAAATT | 49 | 4323 |
| 1210368 | N/A | N/A | 3365 | 3380 | TTAATCAATAACCACC | 74 | 4324 |
| 1210396 | N/A | N/A | 4312 | 4327 | TTTACGATTTGAAAGG | 84 | 4325 |
| 1210424 | N/A | N/A | 4744 | 4759 | AGACTACCACCGAATA | 27 | 4326 |
| 1210452 | N/A | N/A | 4937 | 4952 | TCTTAGCCGGACACAC | 61 | 4327 |
| 1210480 | N/A | N/A | 5275 | 5290 | ATGCGCCTCAAGAAAA | 77 | 4328 |
| 1210508 | N/A | N/A | 5806 | 5821 | CCGCTATCCAGACACC | 59 | 4329 |
| 1210536 | N/A | N/A | 6243 | 6258 | CGGCAGGACATTTATC | 101 | 4330 |
| 1210564 | N/A | N/A | 6501 | 6516 | CACCGCGCGCTTCCCC | 58 | 4331 |
| 1210592 | N/A | N/A | 6768 | 6783 | CCCAGATTTCCGTCTG | 68 | 4332 |
| 1210620 | N/A | N/A | 7142 | 7157 | AGCGGAAGGCCCGGCC | 118 | 4333 |
| 1210648 | N/A | N/A | 7872 | 7887 | GAAGTTACTCTGATGG | 30 | 4334 |
| 1210676 | N/A | N/A | 8714 | 8729 | GATGGCGAAAAGCACC | 66 | 4335 |
| 1210704 | N/A | N/A | 9178 | 9193 | TCGATATTTTTTTCAA | 60 | 4336 |
| 1210732 | N/A | N/A | 9407 | 9422 | AGGTTTTGATGCTAGG | 5 | 4337 |
| 1210752 | N/A | N/A | 9711 | 9726 | ATCGCTATGGCCTACC | 11 | 4338 |
| 1210806 | N/A | N/A | 10580 | 10595 | TCCGGGCCCAAGAGTC | 107 | 4339 |
| 1210834 | N/A | N/A | 11007 | 11022 | ACCCAGCATGTTCAGG | 52 | 4340 |
| 1210862 | N/A | N/A | 11625 | 11640 | CACATGGCGCAGTGGC | 86 | 4341 |
| 1210890 | N/A | N/A | 12064 | 12079 | CTCTTCGACCAGGCTC | 19 | 4342 |
| 1210918 | N/A | N/A | 12485 | 12500 | GAAAGTGTCTGCATCT | 39 | 4343 |
| 1210946 | N/A | N/A | 13363 | 13378 | AACAGGTCTGGGATTC | 70 | 4344 |
| 1210974 | N/A | N/A | 13865 | 13880 | GGAGTGGATCATTCAG | 40 | 4345 |
| 1211002 | N/A | N/A | 14340 | 14355 | CTACTTACCCCTCACT | 72 | 4346 |
| 1211030 | N/A | N/A | 14885 | 14900 | CACCCATAGGGTCTTG | 65 | 4347 |
| 1211058 | N/A | N/A | 15496 | 15511 | CCCGCCCACACACTGT | 74 | 4348 |
| 1211086 | N/A | N/A | 16016 | 16031 | CTGGCATGTTGACAAC | 81 | 4349 |
| 1211114 | N/A | N/A | 16775 | 16790 | ATCACTATGGAAGGAA | 82 | 4350 |
| 1211139 | N/A | N/A | 17568 | 17583 | CTTCGGTATAGAGGAA | 80 | 4351 |
| 1211167 | N/A | N/A | 18608 | 18623 | CAGGCAGACCCGGTGC | 65 | 4352 |
| 1211195 | N/A | N/A | 18985 | 19000 | GAATTCTCCCCATAGA | 93 | 4353 |
| 1211219 | N/A | N/A | 19173 | 19188 | TCTTTCAAACGGATTT | 28 | 4354 |
| 1211246 | N/A | N/A | 19757 | 19772 | GGAGACAACTATGTGC | 24 | 4355 |
| 1211274 | N/A | N/A | 20290 | 20305 | ATTACCAGCATGGAAC | 53 | 4356 |
| 1211302 | N/A | N/A | 21398 | 21413 | CGATACTCTTCCCCAC | 52 | 4357 |
| 1211330 | N/A | N/A | 22452 | 22467 | ATTGGGTTGTCATAAT | 73 | 4358 |
| 1211356 | N/A | N/A | 23002 | 23017 | AAGGGCTAGTGGAATT | 72 | 4359 |
| 1211380 | N/A | N/A | 23995 | 24010 | CAGACAATACATAGTG | 19 | 4360 |
| 1211404 | N/A | N/A | 25332 | 25347 | GTCAGGTAGACCAAAA | 75 | 4361 |
| 1211432 | N/A | N/A | 26444 | 26459 | TCACCCTTAACCCCGC | 57 | 4362 |
| 1211452 | N/A | N/A | 27104 | 27119 | TAGTAACTGAGTAAGA | 31 | 4363 |
| 1211480 | N/A | N/A | 27782 | 27797 | AGGGCTTATCAGAACT | 91 | 4364 |
| 1211508 | N/A | N/A | 28626 | 28641 | GGAGACTCATGAACAT | 51 | 4365 |
| 1211515 | N/A | N/A | 28824 | 28839 | GTCCAGATTGCAGTTT | 12 | 4366 |
| 1211542 | N/A | N/A | 29396 | 29411 | TGCTGGTTCAGTCAAC | 59 | 4367 |
| 1211570 | N/A | N/A | 30015 | 30030 | TGATTTGATATCAAAC | 75 | 4368 |
| 1211597 | N/A | N/A | 30702 | 30717 | GACTTTGAGTTTTGGC | 16 | 4369 |
| 1211625 | N/A | N/A | 31136 | 31151 | ATCCTAGAGATCTGAG | 67 | 4370 |
| 1211650 | N/A | N/A | 31541 | 31556 | TCCGGAGACTACACAG | 102 | 4371 |
| 1211678 | N/A | N/A | 32358 | 32373 | TTAATGGCTATGTCAG | 54 | 4372 |
| 1211706 | N/A | N/A | 33300 | 33315 | CAGTGAGACATCCATA | 8 | 4373 |
| 1211734 | N/A | N/A | 33748 | 33763 | GTGGGAACACAGCGAT | 119 | 4374 |
| 1211762 | N/A | N/A | 34196 | 34211 | GAAATGCACCAGATGC | 81 | 4375 |
| 1211790 | N/A | N/A | 34569 | 34584 | ATGGGTAGGTCTGCAA | 36 | 4376 |
| 1211818 | N/A | N/A | 34832 | 34847 | AGCCAAATACCCCTAG | 87 | 4377 |
| 1211846 | N/A | N/A | 35232 | 35247 | GCTGAGTGGACCAGCT | 83 | 4378 |
| 1211874 | N/A | N/A | 35585 | 35600 | TCAGGAGCGAAATCAT | 39 | 4379 |
| 1211902 | N/A | N/A | 36066 | 36081 | CTCAAACTGATGGCCC | 89 | 4380 |
| 1211930 | N/A | N/A | 36460 | 36475 | TTATTGGAGTCACGCC | 28 | 4381 |
| 1211958 | N/A | N/A | 36861 | 36876 | AGAGCGGCCCCCTCTC | 110 | 4382 |

TABLE 68
Percent control of human PMP22 RNA with 3-10-3 cEt gapmers

| | SEQ | SEQ | SEQ | SEQ | | | |
|---|---|---|---|---|---|---|---|
| | ID | ID | ID | ID | | | |
| | NO: 1 | NO: 1 | NO: 2 | NO: 2 | | PMP22 | SEQ |
| Compound | Start | Stop | Start | Stop | | (% | ID |
| ID | Site | Site | Site | Site | Sequence (5′ to 3′) | UTC) | NO |
| 684267 | 864 | 879 | 37227 | 37242 | ATCTTCAATCAACAGC | 11 | 30 |
| 684394 | 1489 | 1504 | 37852 | 37867 | ATTATTCAGGTCTCCA | 9 | 31 |
| 684394 | 1489 | 1504 | 37852 | 37867 | ATTATTCAGGTCTCCA | 7 | 31 |
| 1078160 | 1475 | 1490 | 37838 | 37853 | CATTCTATCTTATGTT | 29 | 4383 |
| 1205153 | N/A | N/A | 10235 | 10250 | ACAAGATTAAGCACTG | 11 | 4384 |
| 1205161 | N/A | N/A | 16813 | 16828 | ATAACTGGTCCTTCCC | 48 | 4385 |
| 1205180 | N/A | N/A | 22455 | 22470 | TTTATTGGGTTGTCAT | 20 | 4386 |
| 1205200 | N/A | N/A | 24026 | 24041 | ACATCATATAAACCAG | 22 | 4387 |
| 1209889 | N/A | N/A | 7661 | 7676 | TCAACGAGGCTGCATC | 23 | 4388 |
| 1209917 | N/A | N/A | 9713 | 9728 | CAATCGCTATGGCCTA | 47 | 4389 |
| 1209945 | N/A | N/A | 11260 | 11275 | AATGGTTCGCAATGAG | 8 | 4390 |
| 1209973 | N/A | N/A | 15391 | 15406 | CAGATTACAGGAAAGC | 24 | 4391 |
| 1210001 | N/A | N/A | 16505 | 16520 | ACTATTAGCTCTTCAA | 19 | 4392 |
| 1210029 | N/A | N/A | 19402 | 19417 | AATAGTAAGCTGTCTG | 17 | 4393 |
| 1210057 | N/A | N/A | 21592 | 21607 | ATGCAAGCTATTATCT | 62 | 4394 |
| 1210086 | N/A | N/A | 23419 | 23434 | ATTATGGTATATCCTC | 8 | 4395 |
| 1210114 | N/A | N/A | 24607 | 24622 | TCCTAATCCATATTGC | 45 | 4396 |
| 1210142 | N/A | N/A | 26241 | 26256 | GCCATAAGTTATTTCT | 30 | 4397 |
| 1210170 | N/A | N/A | 27096 | 27111 | GAGTAAGATAAACTTG | 75 | 4398 |
| 1210198 | N/A | N/A | 29033 | 29048 | AGAATCTAGGAACTGG | 33 | 4399 |
| 1210227 | N/A | N/A | 29930 | 29945 | TGAGTAAGGGTAACTC | 80 | 4400 |
| 1210255 | N/A | N/A | 30798 | 30813 | TAAATCGCAATACCTA | 27 | 4401 |
| 1210283 | N/A | N/A | 32680 | 32695 | CTAATCATCCAACCAA | 32 | 4402 |
| 1210311 | N/A | N/A | 35006 | 35021 | CACTTTATATGATTGT | 41 | 4403 |
| 1210369 | N/A | N/A | 3378 | 3393 | TGAACCCAATAGTTTA | 75 | 4404 |
| 1210397 | N/A | N/A | 4347 | 4362 | CATCACTCTCAATGAT | 106 | 4405 |
| 1210425 | N/A | N/A | 4747 | 4762 | ACCAGACTACCACCGA | 75 | 4406 |
| 1210453 | N/A | N/A | 4939 | 4954 | CGTCTTAGCCGGACAC | 99 | 4407 |
| 1210481 | N/A | N/A | 5278 | 5293 | TAAATGCGCCTCAAGA | 109 | 4408 |
| 1210509 | N/A | N/A | 5810 | 5825 | TTATCCGCTATCCAGA | 62 | 4409 |
| 1210537 | N/A | N/A | 6245 | 6260 | GCCGGCAGGACATTTA | 105 | 4410 |
| 1210565 | N/A | N/A | 6503 | 6518 | TCCACCGCGCGCTTCC | 105 | 4411 |
| 1210593 | N/A | N/A | 6777 | 6792 | GAGTAGGTGCCCAGAT | 104 | 4412 |
| 1210621 | N/A | N/A | 7147 | 7162 | GCACTAGCGGAAGGCC | 94 | 4413 |
| 1210649 | N/A | N/A | 7898 | 7913 | CTAATGGGCTGGACAG | 61 | 4414 |
| 1210677 | N/A | N/A | 8716 | 8731 | GGGATGGCGAAAAGCA | 90 | 4415 |
| 1210705 | N/A | N/A | 9183 | 9198 | CCAGGTCGATATTTTT | 20 | 4416 |
| 1210733 | N/A | N/A | 9431 | 9446 | ATCTTGCAACAAGGAA | 25 | 4417 |
| 1210753 | N/A | N/A | 9714 | 9729 | TCAATCGCTATGGCCT | 23 | 4418 |
| 1210807 | N/A | N/A | 10582 | 10597 | CTTCCGGGCCCAAGAG | 117 | 4419 |
| 1210835 | N/A | N/A | 11033 | 11048 | ATTAAGCCTGAGTGGC | 83 | 4420 |
| 1210863 | N/A | N/A | 11700 | 11715 | GCAACCCCCAGAGAGA | 53 | 4421 |
| 1210891 | N/A | N/A | 12069 | 12084 | CCTGACTCTTCGACCA | 31 | 4422 |
| 1210919 | N/A | N/A | 12489 | 12504 | GCTAGAAAGTGTCTGC | 92 | 4423 |
| 1210947 | N/A | N/A | 13402 | 13417 | TAGATATCCCAAGGGA | 91 | 4424 |
| 1210975 | N/A | N/A | 13889 | 13904 | GGGAGGTGAGACTTAA | 92 | 4425 |
| 1211003 | N/A | N/A | 14344 | 14359 | GATTCTACTTACCCCT | 20 | 4426 |
| 1211031 | N/A | N/A | 14891 | 14906 | TAAACTCACCCATAGG | 49 | 4427 |
| 1211059 | N/A | N/A | 15530 | 15545 | GTAAGTGGTCATCTTC | 26 | 4428 |
| 1211087 | N/A | N/A | 16038 | 16053 | AGAAACCCTAAGGGTT | 75 | 4429 |
| 1211140 | N/A | N/A | 17570 | 17585 | CCCTTCGGTATAGAGG | 73 | 4430 |
| 1211168 | N/A | N/A | 18611 | 18626 | TTACAGGCAGACCCGG | 70 | 4431 |
| 1211196 | N/A | N/A | 18987 | 19002 | AGGAATTCTCCCCATA | 77 | 4432 |
| 1211220 | N/A | N/A | 19204 | 19219 | TCAAAGCCTGCTTAAC | 67 | 4433 |
| 1211247 | N/A | N/A | 19762 | 19777 | CAGATGGAGACAACTA | 48 | 4434 |
| 1211275 | N/A | N/A | 20351 | 20366 | TGAGTTAAGGGCTCAG | 75 | 4435 |
| 1211303 | N/A | N/A | 21401 | 21416 | TGGCGATACTCTTCCC | 80 | 4436 |
| 1211357 | N/A | N/A | 23005 | 23020 | TCAAAGGGCTAGTGGA | 52 | 4437 |
| 1211405 | N/A | N/A | 25339 | 25354 | AATAGATGTCAGGTAG | 40 | 4438 |
| 1211433 | N/A | N/A | 26446 | 26461 | CTTCACCCTTAACCCC | 15 | 4439 |
| 1211453 | N/A | N/A | 27161 | 27176 | CATACCTTCAATGCTT | 52 | 4440 |
| 1211481 | N/A | N/A | 27785 | 27800 | TGAAGGGCTTATCAGA | 81 | 4441 |
| 1211509 | N/A | N/A | 28657 | 28672 | CCACCCTCACTTTATG | 101 | 4442 |
| 1211516 | N/A | N/A | 28825 | 28840 | TGTCCAGATTGCAGTT | 18 | 4443 |
| 1211543 | N/A | N/A | 29426 | 29441 | ACATCTAGCTCTTACT | 87 | 4444 |
| 1211571 | N/A | N/A | 30044 | 30059 | CCACTGATGCAATGGA | 106 | 4445 |
| 1211598 | N/A | N/A | 30720 | 30735 | TAAGGGTTCTTATCTC | 33 | 4446 |
| 1211626 | N/A | N/A | 31166 | 31181 | GAAAGATCCTGCAGCC | 36 | 4447 |
| 1211651 | N/A | N/A | 31543 | 31558 | CTTCCGGAGACTACAC | 53 | 4448 |
| 1211679 | N/A | N/A | 32362 | 32377 | CAGTTTAATGGCTATG | 13 | 4449 |
| 1211707 | N/A | N/A | 33314 | 33329 | GATTTGGGCATGGCCA | 71 | 4450 |
| 1211735 | N/A | N/A | 33774 | 33789 | ACCGCCTGGTGTGTTC | 121 | 4451 |
| 1211763 | N/A | N/A | 34212 | 34227 | TTTCGAGAGAGGGAAG | 114 | 4452 |
| 1211791 | N/A | N/A | 34575 | 34590 | CTCAGGATGGGTAGGT | 35 | 4453 |
| 1211819 | N/A | N/A | 34851 | 34866 | TCCAGTAGTCATCTCC | 11 | 4454 |
| 1211847 | N/A | N/A | 35265 | 35280 | CTAACCAGATCTGGCA | 72 | 4455 |
| 1211875 | N/A | N/A | 35624 | 35639 | CACCTACAGGAAGTTC | 82 | 4456 |
| 1211903 | N/A | N/A | 36068 | 36083 | CGCTCAAACTGATGGC | 64 | 4457 |
| 1211931 | N/A | N/A | 36467 | 36482 | TTTACCATTATTGGAG | 54 | 4458 |
| 1211959 | N/A | N/A | 36863 | 36878 | GCAGAGCGGCCCCCTC | 52 | 4459 |

TABLE 69
Percent control of human PMP22 RNA with 3-10-3 cEt gapmers

| | SEQ | SEQ | SEQ | SEQ | | | |
|---|---|---|---|---|---|---|---|
| | ID | ID | ID | ID | | | |
| | NO: 1 | NO: 1 | NO: 2 | NO: 2 | | PMP22 | SEQ |
| Compound | Start | Stop | Start | Stop | | (% | ID |
| ID | Site | Site | Site | Site | Sequence (5′ to 3′) | UTC) | NO |
| 684267 | 864 | 879 | 37227 | 37242 | ATCTTCAATCAACAGC | 27 | 30 |
| 684394 | 1489 | 1504 | 37852 | 37867 | ATTATTCAGGTCTCCA | 6 | 31 |
| 684394 | 1489 | 1504 | 37852 | 37867 | ATTATTCAGGTCTCCA | 12 | 31 |
| 1078136 | 1493 | 1508 | 37856 | 37871 | CAGAATTATTCAGGTC | 7 | 4460 |
| 1079080 | N/A | N/A | 28707 | 28722 | AGTCCCAAGTTCTAAG | 93 | 4461 |
| 1209892 | N/A | N/A | 7743 | 7758 | AGTCCTAAAAGGGTGT | 91 | 4462 |
| 1209920 | N/A | N/A | 9843 | 9858 | CTGTATTTCCGTGGCC | 88 | 4463 |
| 1209948 | N/A | N/A | 11971 | 11986 | AACGAATATCCCCACA | 38 | 4464 |
| 1209976 | N/A | N/A | 15538 | 15553 | GAAGAGTAGTAAGTGG | 28 | 4465 |
| 1210004 | N/A | N/A | 16673 | 16688 | CCATAGTGATGCATGT | 80 | 4466 |
| 1210032 | N/A | N/A | 19446 | 19461 | AAGGGAATAACACGCA | 10 | 4467 |
| 1210060 | N/A | N/A | 21701 | 21716 | CAAAATCAGCCATAGC | 72 | 4468 |
| 1210089 | N/A | N/A | 23510 | 23525 | TTATCTACTATATCCT | 66 | 4469 |
| 1210117 | N/A | N/A | 24893 | 24908 | AGTGAACTACACTTTC | 93 | 4470 |
| 1210145 | N/A | N/A | 26261 | 26276 | CCATTACAATTGAGCT | 40 | 4471 |
| 1210173 | N/A | N/A | 27182 | 27197 | CATATGTAATGGCTTC | 102 | 4472 |
| 1210201 | N/A | N/A | 29350 | 29365 | AATGTAAGATGCTAGG | 31 | 4473 |
| 1210230 | N/A | N/A | 30014 | 30029 | GATTTGATATCAAACT | 81 | 4474 |
| 1210258 | N/A | N/A | 31220 | 31235 | AACCAGGAACTCTCCA | 97 | 4475 |
| 1210286 | N/A | N/A | 32852 | 32867 | TTAAATGCTCTATAGC | 88 | 4476 |
| 1210314 | N/A | N/A | 35131 | 35146 | GCGACTAACTACACAG | 63 | 4477 |
| 1210372 | N/A | N/A | 3403 | 3418 | CTACAGCTCGCTTCTT | 128 | 4478 |
| 1210400 | N/A | N/A | 4427 | 4442 | ATGCAGCAGTTCACGC | 122 | 4479 |
| 1210428 | N/A | N/A | 4766 | 4781 | TCCTCCTAGCCTAGGC | 159 | 4480 |
| 1210456 | N/A | N/A | 5022 | 5037 | CCCACTAATAGAGGGC | 88 | 4481 |
| 1210484 | N/A | N/A | 5374 | 5389 | GTAGGGTGTGTCCCTG | 150 | 4482 |
| 1210512 | N/A | N/A | 5817 | 5832 | GCCGCCCTTATCCGCT | 100 | 4483 |
| 1210540 | N/A | N/A | 6262 | 6277 | AATTTCAGCCGGTCAG | 124 | 4484 |
| 1210568 | N/A | N/A | 6517 | 6532 | CCCTGCGCTTCCCGTC | 196 | 4485 |
| 1210596 | N/A | N/A | 6833 | 6848 | CCGAGACCCCGGTTCA | 117 | 4486 |
| 1210624 | N/A | N/A | 7155 | 7170 | GGTCCCGCGCACTAGC | 152 | 4487 |
| 1210652 | N/A | N/A | 7924 | 7939 | CATCGCCAAGAAAATA | 69 | 4488 |
| 1210680 | N/A | N/A | 8783 | 8798 | ATCAGATAGATATCCT | 82 | 4489 |
| 1210708 | N/A | N/A | 9187 | 9202 | GCTCCCAGGTCGATAT | 91 | 4490 |
| 1210736 | N/A | N/A | 9470 | 9485 | AGGCTTAGCTTAGGGT | 120 | 4491 |
| 1210756 | N/A | N/A | 9737 | 9752 | TCCAGGTCCACGGGCT | 89 | 4492 |
| 1210782 | N/A | N/A | 10316 | 10331 | ACTCAGTTGCCAACTC | 59 | 4493 |
| 1210810 | N/A | N/A | 10607 | 10622 | TTAACACGCCTGCCAA | 45 | 4494 |
| 1210838 | N/A | N/A | 11130 | 11145 | CTTAAGGCTGAAGTCG | 99 | 4495 |
| 1210866 | N/A | N/A | 11736 | 11751 | CAGGAGGCCCCATTCA | 120 | 4496 |
| 1210894 | N/A | N/A | 12132 | 12147 | TCCCTTTGGGCACCTG | 89 | 4497 |
| 1210922 | N/A | N/A | 12657 | 12672 | AGGTGTAGGTGTGACC | 93 | 4498 |
| 1210950 | N/A | N/A | 13522 | 13537 | GATGTTTGGCTTGCTG | 60 | 4499 |
| 1210978 | N/A | N/A | 13961 | 13976 | CTCCCGAAGTGGGAAG | 101 | 4500 |
| 1211006 | N/A | N/A | 14389 | 14404 | AACTCCTTCCTAGTGG | 91 | 4501 |
| 1211034 | N/A | N/A | 14944 | 14959 | TCATTCAATAGCAGGG | 7 | 4502 |
| 1211062 | N/A | N/A | 15615 | 15630 | CCTATTGATAGTCATG | 33 | 4503 |
| 1211090 | N/A | N/A | 16104 | 16119 | AGGTCATACAGTTCAG | 9 | 4504 |
| 1211117 | N/A | N/A | 16905 | 16920 | TCTCCCGCATTCCCCA | 85 | 4505 |
| 1211143 | N/A | N/A | 17598 | 17613 | ACTGTATTCAGCACCA | 44 | 4506 |
| 1211171 | N/A | N/A | 18629 | 18644 | CCCAGGTTACCTAATT | 111 | 4507 |
| 1211199 | N/A | N/A | 19019 | 19034 | ATTCGCTTAGTTTTAA | 36 | 4508 |
| 1211223 | N/A | N/A | 19219 | 19234 | ATGTACCATGAATGAT | 28 | 4509 |
| 1211250 | N/A | N/A | 19787 | 19802 | CCTATGATTCATGCGG | 76 | 4510 |
| 1211278 | N/A | N/A | 20365 | 20380 | GGCCTACAACCTAGTG | 154 | 4511 |
| 1211306 | N/A | N/A | 21462 | 21477 | AAACCTAGTGTGACAC | 40 | 4512 |
| 1211333 | N/A | N/A | 22522 | 22537 | ACCTAACTTGCCACAT | 92 | 4513 |
| 1211360 | N/A | N/A | 23036 | 23051 | ATTGACTTACTAAGAG | 65 | 4514 |
| 1211383 | N/A | N/A | 24278 | 24293 | CATAGAAGTATGATAT | 85 | 4515 |
| 1211408 | N/A | N/A | 25487 | 25502 | TGGTTTACATGATCTA | 29 | 4516 |
| 1211436 | N/A | N/A | 26504 | 26519 | GGAGTATGGCTGGTGG | 80 | 4517 |
| 1211456 | N/A | N/A | 27214 | 27229 | GCAGCATTTAATCCTT | 87 | 4518 |
| 1211484 | N/A | N/A | 27842 | 27857 | TTAAAGAGGGCCTGAG | 115 | 4519 |
| 1211518 | N/A | N/A | 28844 | 28859 | GTATTCACCTCTGATT | 58 | 4520 |
| 1211546 | N/A | N/A | 29486 | 29501 | ACATACTCTGGTACAT | 46 | 4521 |
| 1211574 | N/A | N/A | 30060 | 30075 | TATCTTGAGGGCATAT | 45 | 4522 |
| 1211601 | N/A | N/A | 30735 | 30750 | GTTACATGAGTGACTT | 46 | 4523 |
| 1211629 | N/A | N/A | 31233 | 31248 | CACACGATAAGGGAAC | 38 | 4524 |
| 1211654 | N/A | N/A | 31656 | 31671 | GCCCTAGCACCTTTCA | 95 | 4525 |
| 1211682 | N/A | N/A | 32370 | 32385 | ATTAGGGACAGTTTAA | 67 | 4526 |
| 1211710 | N/A | N/A | 33331 | 33346 | CCCATAGCATTGACTC | 42 | 4527 |
| 1211738 | N/A | N/A | 33830 | 33845 | GCAGGATTCAGTAGAA | 133 | 4528 |
| 1211766 | N/A | N/A | 34224 | 34239 | AGTTCGATGGAATTTC | 23 | 4529 |
| 1211794 | N/A | N/A | 34607 | 34622 | TGAGCATTCAACTTAC | 64 | 4530 |
| 1211822 | N/A | N/A | 34927 | 34942 | ATGTACCCTGAAATAG | 77 | 4531 |
| 1211850 | N/A | N/A | 35281 | 35296 | CTCCCAAATGGGCTGT | 100 | 4532 |
| 1211878 | N/A | N/A | 35670 | 35685 | CACACAATAGTCTTGG | 36 | 4533 |
| 1211906 | N/A | N/A | 36080 | 36095 | GTGGAGCAGCCACGCT | 116 | 4534 |
| 1211934 | N/A | N/A | 36501 | 36516 | GCATTACCTAAAGCCA | 86 | 4535 |
| 1211962 | N/A | N/A | 36880 | 36895 | GTGACGGAGAGTCCAT | 123 | 4536 |

TABLE 70
Percent control of human PMP22 RNA with 3-10-3 cEt gapmers

| | SEQ | SEQ | SEQ | SEQ | | | |
|---|---|---|---|---|---|---|---|
| | ID | ID | ID | ID | | | |
| | NO: 1 | NO: 1 | NO: 2 | NO: 2 | | PMP22 | SEQ |
| Compound | Start | Stop | Start | Stop | | (% | ID |
| ID | Site | Site | Site | Site | Sequence (5′ to 3′) | UTC) | NO |
| 684267 | 864 | 879 | 37227 | 37242 | ATCTTCAATCAACAGC | 21 | 30 |
| 684394 | 1489 | 1504 | 37852 | 37867 | ATTATTCAGGTCTCCA | 8 | 31 |
| 684394 | 1489 | 1504 | 37852 | 37867 | ATTATTCAGGTCTCCA | 19 | 31 |
| 1078144 | 1501 | 1516 | 37864 | 37879 | ATATTACACAGAATTA | 75 | 4537 |
| 1079081 | N/A | N/A | 28708 | 28723 | AAGTCCCAAGTTCTAA | 95 | 4538 |
| 1205164 | N/A | N/A | 16928 | 16943 | CAGCGATCCTGCTCCC | 108 | 4539 |
| 1205219 | N/A | N/A | 26550 | 26565 | GGATTCACTTTGGCTG | 77 | 4540 |
| 1209893 | N/A | N/A | 7751 | 7766 | CAATTTCAAGTCCTAA | 84 | 4541 |
| 1209921 | N/A | N/A | 9847 | 9862 | AAAGCTGTATTTCCGT | 8 | 4542 |
| 1209949 | N/A | N/A | 11973 | 11988 | ATAACGAATATCCCCA | 41 | 4543 |
| 1209977 | N/A | N/A | 15612 | 15627 | ATTGATAGTCATGAGT | 16 | 4544 |
| 1210005 | N/A | N/A | 16677 | 16692 | CTACCCATAGTGATGC | 32 | 4545 |
| 1210033 | N/A | N/A | 19447 | 19462 | AAAGGGAATAACACGC | 21 | 4546 |
| 1210061 | N/A | N/A | 21736 | 21751 | CTTCTTAACAACTACT | 58 | 4547 |
| 1210090 | N/A | N/A | 23528 | 23543 | CTATATGTGTTCAAGT | 67 | 4548 |
| 1210118 | N/A | N/A | 24938 | 24953 | CAATGTATACACTTCT | 22 | 4549 |
| 1210146 | N/A | N/A | 26262 | 26277 | CCCATTACAATTGAGC | 56 | 4550 |
| 1210174 | N/A | N/A | 27604 | 27619 | ATCAATTTGCTTGGAC | 30 | 4551 |
| 1210202 | N/A | N/A | 29452 | 29467 | GAATTTGGACCACAGA | 30 | 4552 |
| 1210231 | N/A | N/A | 30035 | 30050 | CAATGGATATGATCAT | 80 | 4553 |
| 1210259 | N/A | N/A | 31247 | 31262 | TGACTTAGAACTGTCA | 82 | 4554 |
| 1210287 | N/A | N/A | 33163 | 33178 | TTTCCTAGAGAGGCAG | 51 | 4555 |
| 1210315 | N/A | N/A | 35147 | 35162 | AGTATAGAGAAGTGCA | 47 | 4556 |
| 1210373 | N/A | N/A | 3420 | 3435 | AGTGCATATATTGGGT | 105 | 4557 |
| 1210401 | N/A | N/A | 4482 | 4497 | CTTGAGGCACGGGACA | 146 | 4558 |
| 1210429 | N/A | N/A | 4775 | 4790 | GGATTGGGCTCCTCCT | 103 | 4559 |
| 1210457 | N/A | N/A | 5063 | 5078 | ACGCCGACCGCGCCCG | 99 | 4560 |
| 1210485 | N/A | N/A | 5377 | 5392 | GCAGTAGGGTGTGTCC | 134 | 4561 |
| 1210513 | N/A | N/A | 5825 | 5840 | AGAACTGGGCCGCCCT | 132 | 4562 |
| 1210541 | N/A | N/A | 6265 | 6280 | GAGAATTTCAGCCGGT | 95 | 4563 |
| 1210569 | N/A | N/A | 6523 | 6538 | CCCGGACCCTGCGCTT | 144 | 4564 |
| 1210597 | N/A | N/A | 6836 | 6851 | TCTCCGAGACCCCGGT | 107 | 4565 |
| 1210625 | N/A | N/A | 7370 | 7385 | GGCCGCGCAGGGAGCC | 109 | 4566 |
| 1210653 | N/A | N/A | 8385 | 8400 | CTAAGTCACAAATCCC | 53 | 4567 |
| 1210681 | N/A | N/A | 8804 | 8819 | CACGATCCATTGCTAG | 128 | 4568 |
| 1210709 | N/A | N/A | 9188 | 9203 | AGCTCCCAGGTCGATA | 109 | 4569 |
| 1210737 | N/A | N/A | 9473 | 9488 | CCAAGGCTTAGCTTAG | 87 | 4570 |
| 1210757 | N/A | N/A | 9745 | 9760 | CATGTGGATCCAGGTC | 97 | 4571 |
| 1210783 | N/A | N/A | 10356 | 10371 | GCTACGGTCACATTCT | 16 | 4572 |
| 1210811 | N/A | N/A | 10609 | 10624 | TTTTAACACGCCTGCC | 68 | 4573 |
| 1210839 | N/A | N/A | 11137 | 11152 | TTCGCCACTTAAGGCT | 92 | 4574 |
| 1210867 | N/A | N/A | 11746 | 11761 | GGCACGATGCCAGGAG | 97 | 4575 |
| 1210895 | N/A | N/A | 12160 | 12175 | CCCTGAACTCAGACGC | 68 | 4576 |
| 1210923 | N/A | N/A | 12660 | 12675 | AATAGGTGTAGGTGTG | 80 | 4577 |
| 1210951 | N/A | N/A | 13526 | 13541 | TCTAGATGTTTGGCTT | 107 | 4578 |
| 1210979 | N/A | N/A | 13966 | 13981 | AGAGACTCCCGAAGTG | 75 | 4579 |
| 1211007 | N/A | N/A | 14435 | 14450 | AGGTCTAAGGAAATCA | 54 | 4580 |
| 1211035 | N/A | N/A | 14977 | 14992 | GATCTTGGAGACTTCA | 79 | 4581 |
| 1211063 | N/A | N/A | 15644 | 15659 | CCAAAGCATTGATCTA | 29 | 4582 |
| 1211091 | N/A | N/A | 16250 | 16265 | CTCTCGGGCACCAAAG | 63 | 4583 |
| 1211144 | N/A | N/A | 17649 | 17664 | CTGAACCCTGTTCCCC | 70 | 4584 |
| 1211172 | N/A | N/A | 18642 | 18657 | CCAGGGTACCTGCCCC | 94 | 4585 |
| 1211200 | N/A | N/A | 19022 | 19037 | ATAATTCGCTTAGTTT | 58 | 4586 |
| 1211224 | N/A | N/A | 19236 | 19251 | CTCCTTGGTAATTCAC | 68 | 4587 |
| 1211251 | N/A | N/A | 19793 | 19808 | ACTTTGCCTATGATTC | 46 | 4588 |
| 1211279 | N/A | N/A | 20367 | 20382 | AGGGCCTACAACCTAG | 85 | 4589 |
| 1211307 | N/A | N/A | 21530 | 21545 | GATTCGAGTTCAGAGA | 27 | 4590 |
| 1211334 | N/A | N/A | 22525 | 22540 | CCCACCTAACTTGCCA | 83 | 4591 |
| 1211361 | N/A | N/A | 23039 | 23054 | TCTATTGACTTACTAA | 48 | 4592 |
| 1211384 | N/A | N/A | 24427 | 24442 | ACCTACCAGATTTAAA | 71 | 4593 |
| 1211409 | N/A | N/A | 25702 | 25717 | TTGTAGCTATATTCTA | 33 | 4594 |
| 1211457 | N/A | N/A | 27314 | 27329 | AGGGTAAAAATCTGCA | 93 | 4595 |
| 1211485 | N/A | N/A | 27846 | 27861 | TGTGTTAAAGAGGGCC | 139 | 4596 |
| 1211519 | N/A | N/A | 28846 | 28861 | CAGTATTCACCTCTGA | 99 | 4597 |
| 1211547 | N/A | N/A | 29488 | 29503 | AGACATACTCTGGTAC | 58 | 4598 |
| 1211575 | N/A | N/A | 30125 | 30140 | CATCGCTTATGAAACT | 23 | 4599 |
| 1211602 | N/A | N/A | 30737 | 30752 | CAGTTACATGAGTGAC | 11 | 4600 |
| 1211630 | N/A | N/A | 31244 | 31259 | CTTAGAACTGTCACAC | 22 | 4601 |
| 1211655 | N/A | N/A | 31658 | 31673 | GAGCCCTAGCACCTTT | 32 | 4602 |
| 1211683 | N/A | N/A | 32383 | 32398 | ACCTTACAGTGGGATT | 70 | 4603 |
| 1211711 | N/A | N/A | 33333 | 33348 | CACCCATAGCATTGAC | 105 | 4604 |
| 1211739 | N/A | N/A | 33832 | 33847 | ATGCAGGATTCAGTAG | 105 | 4605 |
| 1211767 | N/A | N/A | 34274 | 34289 | CTTAAGGACTGTGTGT | 91 | 4606 |
| 1211795 | N/A | N/A | 34609 | 34624 | GCTGAGCATTCAACTT | 74 | 4607 |
| 1211823 | N/A | N/A | 34931 | 34946 | ATAGATGTACCCTGAA | 70 | 4608 |
| 1211851 | N/A | N/A | 35283 | 35298 | GGCTCCCAAATGGGCT | 115 | 4609 |
| 1211879 | N/A | N/A | 35695 | 35710 | CTTGACTGGCCCCTGT | 107 | 4610 |
| 1211907 | N/A | N/A | 36126 | 36141 | GCCCTTCGGTGTTGGA | 153 | 4611 |
| 1211935 | N/A | N/A | 36503 | 36518 | TGGCATTACCTAAAGC | 98 | 4612 |
| 1211963 | N/A | N/A | 38217 | 38232 | GAGAGACCAGTGAGTT | 128 | 4613 |

TABLE 71
Percent control of human PMP22 RNA with 3-10-3 cEt gapmers

| | SEQ | SEQ | SEQ | SEQ | | | |
|---|---|---|---|---|---|---|---|
| | ID | ID | ID | ID | | | |
| | NO: 1 | NO: 1 | NO: 2 | NO: 2 | | PMP22 | SEQ |
| Compound | Start | Stop | Start | Stop | | (% | ID |
| ID | Site | Site | Site | Site | Sequence (5′ to 3′) | UTC) | NO |
| 684267 | 864 | 879 | 37227 | 37242 | ATCTTCAATCAACAGC | 26 | 30 |
| 684394 | 1489 | 1504 | 37852 | 37867 | ATTATTCAGGTCTCCA | 20 | 31 |
| 684394 | 1489 | 1504 | 37852 | 37867 | ATTATTCAGGTCTCCA | 12 | 31 |
| 1078157 | 1480 | 1495 | 37843 | 37858 | GTCTCCATTCTATCTT | 90 | 4614 |
| 1205270 | N/A | N/A | 28826 | 28841 | GTGTCCAGATTGCAGT | 40 | 4615 |
| 1209890 | N/A | N/A | 7678 | 7693 | ATAAATACTCCTCTTC | 202 | 4616 |
| 1209918 | N/A | N/A | 9829 | 9844 | CCTTTTAAACCCAGGA | 139 | 4617 |
| 1209946 | N/A | N/A | 11267 | 11282 | CAAGTTAAATGGTTCG | 15 | 4618 |
| 1209974 | N/A | N/A | 15534 | 15549 | AGTAGTAAGTGGTCAT | 57 | 4619 |
| 1210002 | N/A | N/A | 16530 | 16545 | GTTGAAGAACACATGA | 97 | 4620 |
| 1210030 | N/A | N/A | 19438 | 19453 | AACACGCAGCCACTGA | 61 | 4621 |
| 1210058 | N/A | N/A | 21600 | 21615 | GATTCGACATGCAAGC | 66 | 4622 |
| 1210087 | N/A | N/A | 23453 | 23468 | ACATTGATTGTAGCAT | 49 | 4623 |
| 1210115 | N/A | N/A | 24691 | 24706 | GAAACATACTAAGTTC | 123 | 4624 |
| 1210143 | N/A | N/A | 26256 | 26271 | ACAATTGAGCTCTTTG | 107 | 4625 |
| 1210171 | N/A | N/A | 27102 | 27117 | GTAACTGAGTAAGATA | 53 | 4626 |
| 1210199 | N/A | N/A | 29038 | 29053 | CCAGTAGAATCTAGGA | 122 | 4627 |
| 1210228 | N/A | N/A | 29935 | 29950 | AAAATTGAGTAAGGGT | 22 | 4628 |
| 1210256 | N/A | N/A | 30806 | 30821 | AATATACTTAAATCGC | 40 | 4629 |
| 1210284 | N/A | N/A | 32683 | 32698 | TATCTAATCATCCAAC | 88 | 4630 |
| 1210312 | N/A | N/A | 35090 | 35105 | GTAGAATCTCAGAAGT | 55 | 4631 |
| 1210370 | N/A | N/A | 3398 | 3413 | GCTCGCTTCTTCCTTT | 160 | 4632 |
| 1210398 | N/A | N/A | 4374 | 4389 | CCTCTAGTGTACTGTG | 178 | 4633 |
| 1210426 | N/A | N/A | 4753 | 4768 | GGCAAAACCAGACTAC | 103 | 4634 |
| 1210454 | N/A | N/A | 4971 | 4986 | TCTCGGGTCCTGGAGC | 148 | 4635 |
| 1210482 | N/A | N/A | 5284 | 5299 | TGGCCTTAAATGCGCC | 138 | 4636 |
| 1210510 | N/A | N/A | 5812 | 5827 | CCTTATCCGCTATCCA | 129 | 4637 |
| 1210538 | N/A | N/A | 6247 | 6262 | GAGCCGGCAGGACATT | 128 | 4638 |
| 1210566 | N/A | N/A | 6508 | 6523 | TCCCGTCCACCGCGCG | 140 | 4639 |
| 1210594 | N/A | N/A | 6821 | 6836 | TTCAGATGGTGAATTC | 143 | 4640 |
| 1210622 | N/A | N/A | 7150 | 7165 | CGCGCACTAGCGGAAG | 174 | 4641 |
| 1210650 | N/A | N/A | 7901 | 7916 | GATCTAATGGGCTGGA | 153 | 4642 |
| 1210678 | N/A | N/A | 8720 | 8735 | CCCAGGGATGGCGAAA | 165 | 4643 |
| 1210706 | N/A | N/A | 9184 | 9199 | CCCAGGTCGATATTTT | 89 | 4644 |
| 1210734 | N/A | N/A | 9465 | 9480 | TAGCTTAGGGTTTTGC | 92 | 4645 |
| 1210754 | N/A | N/A | 9724 | 9739 | GCTCTTAACATCAATC | 28 | 4646 |
| 1210780 | N/A | N/A | 10297 | 10312 | ATGCAAACCCACCACG | 90 | 4647 |
| 1210808 | N/A | N/A | 10585 | 10600 | CCCCTTCCGGGCCCAA | 111 | 4648 |
| 1210836 | N/A | N/A | 11085 | 11100 | GCGGCAGAGATAACCA | 137 | 4649 |
| 1210864 | N/A | N/A | 11703 | 11718 | GTGGCAACCCCCAGAG | 97 | 4650 |
| 1210892 | N/A | N/A | 12100 | 12115 | AAGGGAGTGATTCACC | 48 | 4651 |
| 1210920 | N/A | N/A | 12580 | 12595 | CTGCTTGAATCATGGA | 33 | 4652 |
| 1210948 | N/A | N/A | 13408 | 13423 | CTCTCTTAGATATCCC | 41 | 4653 |
| 1210976 | N/A | N/A | 13953 | 13968 | GTGGGAAGTTCACATT | 117 | 4654 |
| 1211004 | N/A | N/A | 14357 | 14372 | TGAGATGGTCTGTGAT | 73 | 4655 |
| 1211032 | N/A | N/A | 14911 | 14926 | TCCTTTGGGTCAGTAG | 67 | 4656 |
| 1211060 | N/A | N/A | 15536 | 15551 | AGAGTAGTAAGTGGTC | 26 | 4657 |
| 1211088 | N/A | N/A | 16056 | 16071 | CCTGGGTATTGGCATC | 54 | 4658 |
| 1211115 | N/A | N/A | 16827 | 16842 | CCATGGTTCTTCCTAT | 196 | 4659 |
| 1211141 | N/A | N/A | 17576 | 17591 | TGAATACCCTTCGGTA | 97 | 4660 |
| 1211169 | N/A | N/A | 18613 | 18628 | TGTTACAGGCAGACCC | 78 | 4661 |
| 1211197 | N/A | N/A | 18994 | 19009 | GTTTAGGAGGAATTCT | 123 | 4662 |
| 1211221 | N/A | N/A | 19207 | 19222 | TGATCAAAGCCTGCTT | 112 | 4663 |
| 1211248 | N/A | N/A | 19778 | 19793 | CATGCGGAAAGCAAAA | 114 | 4664 |
| 1211276 | N/A | N/A | 20361 | 20376 | TACAACCTAGTGAGTT | 119 | 4665 |
| 1211304 | N/A | N/A | 21405 | 21420 | AGTGTGGCGATACTCT | 150 | 4666 |
| 1211331 | N/A | N/A | 22473 | 22488 | CTTGAGGCACTAATAT | 112 | 4667 |
| 1211358 | N/A | N/A | 23008 | 23023 | AACTCAAAGGGCTAGT | 116 | 4668 |
| 1211381 | N/A | N/A | 24110 | 24125 | GGTGTTAATCATGAAA | 40 | 4669 |
| 1211406 | N/A | N/A | 25366 | 25381 | GTAGAAGACTTTAGCT | 105 | 4670 |
| 1211434 | N/A | N/A | 26489 | 26504 | GAGACAATATCTTAGA | 93 | 4671 |
| 1211454 | N/A | N/A | 27163 | 27178 | AGCATACCTTCAATGC | 122 | 4672 |
| 1211482 | N/A | N/A | 27788 | 27803 | CTTTGAAGGGCTTATC | 89 | 4673 |
| 1211510 | N/A | N/A | 28681 | 28696 | GTACACACCCACACAT | 150 | 4674 |
| 1211544 | N/A | N/A | 29438 | 29453 | GAATCCACCACTACAT | 89 | 4675 |
| 1211572 | N/A | N/A | 30048 | 30063 | ATATCCACTGATGCAA | 123 | 4676 |
| 1211599 | N/A | N/A | 30725 | 30740 | TGACTTAAGGGTTCTT | 95 | 4677 |
| 1211627 | N/A | N/A | 31170 | 31185 | AGTGGAAAGATCCTGC | 69 | 4678 |
| 1211652 | N/A | N/A | 31546 | 31561 | CCACTTCCGGAGACTA | 73 | 4679 |
| 1211680 | N/A | N/A | 32364 | 32379 | GACAGTTTAATGGCTA | 48 | 4680 |
| 1211708 | N/A | N/A | 33317 | 33332 | TCTGATTTGGGCATGG | 76 | 4681 |
| 1211736 | N/A | N/A | 33778 | 33793 | CATGACCGCCTGGTGT | 165 | 4682 |
| 1211764 | N/A | N/A | 34219 | 34234 | GATGGAATTTCGAGAG | 39 | 4683 |
| 1211792 | N/A | N/A | 34599 | 34614 | CAACTTACAAGAGTTT | 98 | 4684 |
| 1211820 | N/A | N/A | 34874 | 34889 | GCAACCCAAGACAGTT | 122 | 4685 |
| 1211848 | N/A | N/A | 35270 | 35285 | GCTGTCTAACCAGATC | 117 | 4686 |
| 1211876 | N/A | N/A | 35656 | 35671 | GGAACCAAAATGGGAC | 77 | 4687 |
| 1211904 | N/A | N/A | 36071 | 36086 | CCACGCTCAAACTGAT | 138 | 4688 |
| 1211932 | N/A | N/A | 36497 | 36512 | TACCTAAAGCCAATGG | 108 | 4689 |
| 1211960 | N/A | N/A | 36866 | 36881 | ATGGCAGAGCGGCCCC | 150 | 4690 |

TABLE 72
Percent control of human PMP22 RNA with 3-10-3 cEt gapmers

| | SEQ | SEQ | SEQ | SEQ | | | |
|---|---|---|---|---|---|---|---|
| | ID | ID | ID | ID | | | |
| | NO: 1 | NO: 1 | NO: 2 | NO: 2 | | PMP22 | SEQ |
| Compound | Start | Stop | Start | Stop | | (% | ID |
| ID | Site | Site | Site | Site | Sequence (5′ to 3′) | UTC) | NO |
| 684267 | 864 | 879 | 37227 | 37242 | ATCTTCAATCAACAGC | 18 | 30 |
| 684394 | 1489 | 1504 | 37852 | 37867 | ATTATTCAGGTCTCCA | 18 | 31 |
| 684394 | 1489 | 1504 | 37852 | 37867 | ATTATTCAGGTCTCCA | 14 | 31 |
| 1078135 | 1491 | 1506 | 37854 | 37869 | GAATTATTCAGGTCTC | 13 | 4691 |
| 1079079 | N/A | N/A | 28706 | 28721 | GTCCCAAGTTCTAAGA | 101 | 4692 |
| 1209891 | N/A | N/A | 7679 | 7694 | CATAAATACTCCTCTT | 81 | 4693 |
| 1209919 | N/A | N/A | 9840 | 9855 | TATTTCCGTGGCCTTT | 55 | 4694 |
| 1209947 | N/A | N/A | 11352 | 11367 | TCACAAATCGATGTCA | 28 | 4695 |
| 1209975 | N/A | N/A | 15535 | 15550 | GAGTAGTAAGTGGTCA | 65 | 4696 |
| 1210003 | N/A | N/A | 16552 | 16567 | TACATAGGACAGGCTC | 25 | 4697 |
| 1210031 | N/A | N/A | 19443 | 19458 | GGAATAACACGCAGCC | 39 | 4698 |
| 1210059 | N/A | N/A | 21603 | 21618 | TTGGATTCGACATGCA | 38 | 4699 |
| 1210088 | N/A | N/A | 23486 | 23501 | AGTGAACATATACTCA | 62 | 4700 |
| 1210116 | N/A | N/A | 24831 | 24846 | ATTGACTTAATATGGA | 47 | 4701 |
| 1210144 | N/A | N/A | 26260 | 26275 | CATTACAATTGAGCTC | 77 | 4702 |
| 1210172 | N/A | N/A | 27180 | 27195 | TATGTAATGGCTTCAA | 80 | 4703 |
| 1210200 | N/A | N/A | 29335 | 29350 | GCAGAATGCAAGATGT | 134 | 4704 |
| 1210229 | N/A | N/A | 29969 | 29984 | CCAGAATATGTTACAG | 32 | 4705 |
| 1210257 | N/A | N/A | 31078 | 31093 | ACAACGGAGGACAGGA | 39 | 4706 |
| 1210285 | N/A | N/A | 32722 | 32737 | ACATTTGACTTGAGTT | 78* | 4707 |
| 1210313 | N/A | N/A | 35130 | 35145 | CGACTAACTACACAGC | 110 | 4708 |
| 1210371 | N/A | N/A | 3400 | 3415 | CAGCTCGCTTCTTCCT | 140 | 4709 |
| 1210399 | N/A | N/A | 4378 | 4393 | CCTACCTCTAGTGTAC | 114 | 4710 |
| 1210427 | N/A | N/A | 4757 | 4772 | CCTAGGCAAAACCAGA | 126 | 4711 |
| 1210455 | N/A | N/A | 4973 | 4988 | CCTCTCGGGTCCTGGA | 123 | 4712 |
| 1210483 | N/A | N/A | 5298 | 5313 | AGGAGACAGTCACTTG | 154 | 4713 |
| 1210511 | N/A | N/A | 5814 | 5829 | GCCCTTATCCGCTATC | 133 | 4714 |
| 1210539 | N/A | N/A | 6256 | 6271 | AGCCGGTCAGAGCCGG | 93 | 4715 |
| 1210567 | N/A | N/A | 6515 | 6530 | CTGCGCTTCCCGTCCA | 150 | 4716 |
| 1210595 | N/A | N/A | 6827 | 6842 | CCCCGGTTCAGATGGT | 119 | 4717 |
| 1210623 | N/A | N/A | 7152 | 7167 | CCCGCGCACTAGCGGA | 99 | 4718 |
| 1210651 | N/A | N/A | 7905 | 7920 | TTAAGATCTAATGGGC | 70 | 4719 |
| 1210679 | N/A | N/A | 8781 | 8796 | CAGATAGATATCCTGA | 103 | 4720 |
| 1210707 | N/A | N/A | 9186 | 9201 | CTCCCAGGTCGATATT | 85 | 4721 |
| 1210735 | N/A | N/A | 9468 | 9483 | GCTTAGCTTAGGGTTT | 108 | 4722 |
| 1210755 | N/A | N/A | 9730 | 9745 | CCACGGGCTCTTAACA | 113 | 4723 |
| 1210781 | N/A | N/A | 10304 | 10319 | ACTCACCATGCAAACC | 85 | 4724 |
| 1210809 | N/A | N/A | 10587 | 10602 | GCCCCCTTCCGGGCCC | 104 | 4725 |
| 1210837 | N/A | N/A | 11089 | 11104 | GATAGCGGCAGAGATA | 76 | 4726 |
| 1210865 | N/A | N/A | 11712 | 11727 | ACAACATGAGTGGCAA | 57 | 4727 |
| 1210893 | N/A | N/A | 12102 | 12117 | CCAAGGGAGTGATTCA | 52 | 4728 |
| 1210921 | N/A | N/A | 12587 | 12602 | CACCCTACTGCTTGAA | 78 | 4729 |
| 1210949 | N/A | N/A | 13443 | 13458 | GATAAGGACTGTCTCT | 117 | 4730 |
| 1210977 | N/A | N/A | 13957 | 13972 | CGAAGTGGGAAGTTCA | 93 | 4731 |
| 1211005 | N/A | N/A | 14361 | 14376 | CCTTTGAGATGGTCTG | 22 | 4732 |
| 1211033 | N/A | N/A | 14914 | 14929 | GAATCCTTTGGGTCAG | 69 | 4733 |
| 1211061 | N/A | N/A | 15609 | 15624 | GATAGTCATGAGTTTG | 12 | 4734 |
| 1211089 | N/A | N/A | 16060 | 16075 | AATTCCTGGGTATTGG | 96 | 4735 |
| 1211116 | N/A | N/A | 16867 | 16882 | AGGGCCTTGGTTCTTC | 101 | 4736 |
| 1211142 | N/A | N/A | 17578 | 17593 | ATTGAATACCCTTCGG | 43 | 4737 |
| 1211170 | N/A | N/A | 18617 | 18632 | AATTTGTTACAGGCAG | 83 | 4738 |
| 1211198 | N/A | N/A | 19017 | 19032 | TCGCTTAGTTTTAAGA | 55 | 4739 |
| 1211222 | N/A | N/A | 19216 | 19231 | TACCATGAATGATCAA | 16 | 4740 |
| 1211249 | N/A | N/A | 19783 | 19798 | TGATTCATGCGGAAAG | 46 | 4741 |
| 1211277 | N/A | N/A | 20363 | 20378 | CCTACAACCTAGTGAG | 89 | 4742 |
| 1211305 | N/A | N/A | 21435 | 21450 | GTGGCTAAACTATAGA | 100 | 4743 |
| 1211332 | N/A | N/A | 22520 | 22535 | CTAACTTGCCACATAC | 69 | 4744 |
| 1211359 | N/A | N/A | 23034 | 23049 | TGACTTACTAAGAGTC | 100 | 4745 |
| 1211382 | N/A | N/A | 24114 | 24129 | ATATGGTGTTAATCAT | 107 | 4746 |
| 1211407 | N/A | N/A | 25441 | 25456 | AATAACATGGCCTGAA | 82 | 4747 |
| 1211435 | N/A | N/A | 26502 | 26517 | AGTATGGCTGGTGGAG | 74 | 4748 |
| 1211455 | N/A | N/A | 27190 | 27205 | GTAACTGCCATATGTA | 97 | 4749 |
| 1211483 | N/A | N/A | 27823 | 27838 | TGCCTACTACCTTCCC | 105 | 4750 |
| 1211517 | N/A | N/A | 28827 | 28842 | TGTGTCCAGATTGCAG | 59 | 4751 |
| 1211545 | N/A | N/A | 29454 | 29469 | ATGAATTTGGACCACA | 23 | 4752 |
| 1211573 | N/A | N/A | 30053 | 30068 | AGGGCATATCCACTGA | 100 | 4753 |
| 1211600 | N/A | N/A | 30727 | 30742 | AGTGACTTAAGGGTTC | 37 | 4754 |
| 1211628 | N/A | N/A | 31172 | 31187 | TTAGTGGAAAGATCCT | 54 | 4755 |
| 1211653 | N/A | N/A | 31564 | 31579 | ATAATGCAGCCCTCAC | 93 | 4756 |
| 1211681 | N/A | N/A | 32368 | 32383 | TAGGGACAGTTTAATG | 61 | 4757 |
| 1211709 | N/A | N/A | 33327 | 33342 | TAGCATTGACTCTGAT | 64 | 4758 |
| 1211737 | N/A | N/A | 33782 | 33797 | CCAGCATGACCGCCTG | 71 | 4759 |
| 1211765 | N/A | N/A | 34221 | 34236 | TCGATGGAATTTCGAG | 100 | 4760 |
| 1211793 | N/A | N/A | 34601 | 34616 | TTCAACTTACAAGAGT | 79 | 4761 |
| 1211821 | N/A | N/A | 34902 | 34917 | TGATTCTTTGGCTGGG | 55 | 4762 |
| 1211849 | N/A | N/A | 35276 | 35291 | AAATGGGCTGTCTAAC | 61 | 4763 |
| 1211877 | N/A | N/A | 35667 | 35682 | ACAATAGTCTTGGAAC | 72 | 4764 |
| 1211905 | N/A | N/A | 36073 | 36088 | AGCCACGCTCAAACTG | 109 | 4765 |
| 1211933 | N/A | N/A | 36499 | 36514 | ATTACCTAAAGCCAAT | 97 | 4766 |
| 1211961 | N/A | N/A | 36878 | 36893 | GACGGAGAGTCCATGG | 137 | 4767 |

### Example 7: Effect of 3-10-3 cEt Gapmer Modified Oligonucleotides with Phosphorothioate Linkages on Human PMP22 RNA In Vitro, Single Dose

[0379] Modified oligonucleotides in the tables below are 3-10-3 cEt gapmers. The modified oligonucleotides are 16 nucleosides in length, wherein the central gap segment consists often 2′-deoxynucleosides and is flanked by wing segments at the 5′ end and the 3′ end having three nucleosides each. Each nucleoside of the 5′ wing segment and each nucleoside in the 3′ wing segment is a nucleoside. All internucleoside linkages throughout the modified oligonucleotide are phosphorothioate (P═S) linkages. All cytosine residues throughout the modified oligonucleotide are 5-methylcytosines.

[0380] “Start site” indicates the 5′-most nucleoside to which the modified oligonucleotide is targeted in the human gene sequence. “Stop site” indicates the 3′-most nucleoside to which the modified oligonucleotide is targeted human gene sequence. Each modified oligonucleotide listed in the tables below is complementary to SEQ ID NO: 4 (GENBANK Accession No. NM_001281455.1), SEQ ID NO: 5 (GENBANK Accession No. NM_001281456.1), SEQ ID NO: 6 (GENBANK Accession No. NR_104017.1), SEQ ID NO:7 (GENBANK Accession No. NR_104018.1), or SEQ ID NO: 8 (GENBANK Accession No. AK300690.1). ‘N/A’ indicates that the modified oligonucleotide does not target that particular gene sequence with 100% complementarity.

[0381] Cultured A-549 cells at a density of 15,000 cells per well were treated using electroporation with 4,000 nM of modified oligonucleotide. After a treatment period of approximately 24 hours, total RNA was isolated from the cells and PMP22 RNA levels were measured by quantitative real-time RTPCR. Human PMP22 primer probe set RTS35670, described herein above, was used to measure RNA levels. PMP22 RNA levels were adjusted according to total RNA content, as measured by RIBOGREEN®. Results are presented in the tables below as percent PMP22 RNA levels relative to untreated control cells. The modified oligonucleotides with percent control values marked with an asterisk (*) target the amplicon region of the primer probe set. Additional assays may be used to measure the potency and efficacy of the modified oligonucleotides targeting the amplicon region.

TABLE 73
Percent control of human PMP22 RNA with 3-10-3 cEt gapmers

| | SEQ ID | SEQ | SEQ ID | SEQ | | | |
|---|---|---|---|---|---|---|---|
| | NO: 4 | ID NO: | NO: 5 | ID NO: | | PMP22 | SEQ |
| Compound | Start | 4 Stop | Start | 5 Stop | | (% | ID |
| ID | Site | Site | Site | Site | Sequence (5′ to 3′) | UTC) | NO |
| 885810 | 152 | 167 | N/A | N/A | GCTTACAGCCCAAAGG | 80 | 4768 |
| 885811 | 153 | 168 | N/A | N/A | TGCTTACAGCCCAAAG | 83 | 4769 |
| 885812 | 162 | 177 | N/A | N/A | CGGAGTTTCTGCTTAC | 46 | 4770 |
| 885813 | 163 | 178 | N/A | N/A | GCGGAGTTTCTGCTTA | 70 | 4771 |
| 885814 | 165 | 180 | N/A | N/A | CAGCGGAGTTTCTGCT | 87 | 4772 |
| 885815 | N/A | N/A | 192 | 207 | TTTCCGGCCAAACAGC | 75 | 4773 |
| 885816 | N/A | N/A | 193 | 208 | GTTTCCGGCCAAACAG | 61 | 4774 |
| 885817 | N/A | N/A | 194 | 209 | AGTTTCCGGCCAAACA | 138 | 4775 |
| 885818 | N/A | N/A | 195 | 210 | GAGTTTCCGGCCAAAC | 110 | 358 |
| 885819 | N/A | N/A | 197 | 212 | CGGAGTTTCCGGCCAA | 80 | 4776 |
| 885820 | N/A | N/A | 198 | 213 | GCGGAGTTTCCGGCCA | 107 | 4777 |
| 885821 | N/A | N/A | 199 | 214 | AGCGGAGTTTCCGGCC | 91 | 4778 |
| 885822 | N/A | N/A | 200 | 215 | CAGCGGAGTTTCCGGC | 90 | 4779 |
| 885823 | N/A | N/A | 202 | 217 | CTCAGCGGAGTTTCCG | 76 | 4780 |
| 885824 | N/A | N/A | 203 | 218 | GCTCAGCGGAGTTTCC | 50 | 4781 |

TABLE 74
Percent control of human PMP22 RNA with 3-10-3 cEt gapmers

| | SEQ ID | SEQ | SEQ ID | SEQ | | | |
|---|---|---|---|---|---|---|---|
| | NO: 6 | ID NO: | NO: 7 | ID NO: | | PMP22 | SEQ |
| Compound | Start | 6 Stop | Start | 7 Stop | | (% | ID |
| ID | Site | Site | Site | Site | Sequence (5′ to 3′) | UTC) | NO |
| 885865 | 191 | 206 | N/A | N/A | TGCCGGCCAAACAGCG | 58 | 4782 |
| 885866 | 192 | 207 | N/A | N/A | TTGCCGGCCAAACAGC | 102 | 4783 |
| 885867 | 193 | 208 | N/A | N/A | ATTGCCGGCCAAACAG | 100 | 4784 |
| 885868 | 194 | 209 | N/A | N/A | CATTGCCGGCCAAACA | 101 | 4785 |
| 885869 | 195 | 210 | N/A | N/A | CCATTGCCGGCCAAAC | 148 | 4786 |
| 885870 | 196 | 211 | N/A | N/A | TCCATTGCCGGCCAAA | 74 | 4787 |
| 885871 | 197 | 212 | N/A | N/A | ATCCATTGCCGGCCAA | 108 | 4788 |
| 885872 | 198 | 213 | N/A | N/A | GATCCATTGCCGGCCA | 196 | 4789 |
| 885873 | 199 | 214 | N/A | N/A | CGATCCATTGCCGGCC | 113 | 4790 |
| 885874 | 200 | 215 | N/A | N/A | ACGATCCATTGCCGGC | 124 | 4791 |
| 885875 | 201 | 216 | N/A | N/A | CACGATCCATTGCCGG | 140 | 4792 |
| 885876 | 202 | 217 | N/A | N/A | CCACGATCCATTGCCG | 70 | 4793 |
| 885877 | 203 | 218 | N/A | N/A | CCCACGATCCATTGCC | 84 | 4794 |
| 885879 | N/A | N/A | 192 | 207 | ATTCCGGCCAAACAGC | 65 | 4795 |
| 885880 | N/A | N/A | 193 | 208 | CATTCCGGCCAAACAG | 78 | 4796 |
| 885881 | N/A | N/A | 194 | 209 | CCATTCCGGCCAAACA | 67 | 4797 |
| 885882 | N/A | N/A | 195 | 210 | GCCATTCCGGCCAAAC | 84 | 4798 |
| 885883 | N/A | N/A | 196 | 211 | AGCCATTCCGGCCAAA | 78 | 4799 |
| 885884 | N/A | N/A | 197 | 212 | CAGCCATTCCGGCCAA | 59 | 4800 |
| 885885 | N/A | N/A | 198 | 213 | GCAGCCATTCCGGCCA | 57 | 4801 |
| 885886 | N/A | N/A | 199 | 214 | TGCAGCCATTCCGGCC | 110 | 4802 |
| 885887 | N/A | N/A | 200 | 215 | CTGCAGCCATTCCGGC | 188 | 4803 |
| 885888 | N/A | N/A | 201 | 216 | ACTGCAGCCATTCCGG | 78 | 4804 |
| 885889 | N/A | N/A | 202 | 217 | GACTGCAGCCATTCCG | 111 | 4805 |

TABLE 75
Percent control of human PMP22 RNA with 3-10-3 cEt gapmers

| Compound | SEQ ID NO: 8 | SEQ ID NO: 8 | | PMP22 | SEQ ID |
|---|---|---|---|---|---|
| ID | Start Site | Stop Site | Sequence (5′ to 3′) | (% UTC) | NO |
| 885825 | 55 | 70 | AGCGGAGTTTCTGCAG | 92 | 4806 |

### Example 8: Effect of 3-10-3 cEt Gapmer Modified Oligonucleotides on Human PMP22 In Vitro, Multiple Doses

[0382] Modified oligonucleotides selected from the examples above were tested at various doses in K-562 cells. Cells were plated at a density of 50,000 cells per well and treated by electroporation with various doses of modified oligonucleotide, as specified in the tables below. After a treatment period of approximately 24 hours, total RNA was isolated from the cells and PMP22 RNA levels were measured by quantitative real-time PCR. Human PMP22 primer probe set RTS4579, described herein above, was used to measure RNA levels. PMP22 RNA levels were adjusted according to total RNA content, as measured by RIBOGREEN®. Results are presented in the tables below as percent PMP22 RNA levels relative to untreated control cells. The half maximal inhibitory concentration (IC₅₀) of each modified oligonucleotide is also presented. IC₅₀ was calculated using a linear regression on a log/linear plot of the data in excel.

TABLE 76
Dose-dependent reduction of human PMP22 RNA
expression in K-562 cells

| Compound | PMP22 RNA Expression (% Control) | | | | | IC₅₀ |
|---|---|---|---|---|---|---|
| ID | 0.2 μM | 0.7 μM | 2.2 μM | 6.7 μM | 20 μM | (μM) |
| 684440 | 39 | 77 | 40 | 17 | 9 | 0.9 |
| 684277 | 86 | 46 | 24 | 16 | 10 | 1.8 |
| 684367 | 76 | 62 | 37 | 66 | 9 | 6.0 |
| 684289 | 78 | 58 | 43 | 21 | 15 | 3.0 |
| 684343 | 96 | 53 | 40 | 16 | 12 | 3.6 |
| 684363 | 86 | 70 | 31 | 20 | 10 | 3.6 |
| 684457 | 101 | 30 | 61 | 24 | 17 | 4.4 |
| 684394 | 71 | 43 | 22 | 17 | 7 | 0.9 |
| 684264 | 99 | 75 | 54 | 32 | 23 | 10.3 |
| 684267 | 95 | 52 | 48 | 31 | 15 | 5.1 |
| 684160 | 123 | 104 | 51 | 28 | 11 | 12.3 |
| 684382 | 86 | 53 | 50 | 16 | 12 | 3.4 |
| 684339 | 90 | 68 | 35 | 23 | 9 | 4.2 |
| 684312 | 83 | 68 | 40 | 23 | 17 | 4.2 |
| 684453 | 94 | 75 | 49 | 30 | 16 | 7.5 |

TABLE 77
Dose-dependent reduction of human PMP22 RNA
expression in K-562 cells

| Compound | PMP22 RNA Expression (% Control) | | | | | IC₅₀ |
|---|---|---|---|---|---|---|
| ID | 0.2 μM | 0.7 μM | 2.2 μM | 6.7 μM | 20 μM | (μM) |
| 684377 | 94 | 65 | 38 | 16 | 13 | 4.2 |
| 684385 | 82 | 53 | 51 | 13 | 13 | 3.0 |
| 684313 | 81 | 60 | 36 | 24 | 10 | 3.0 |
| 684360 | 99 | 59 | 57 | 21 | 12 | 5.8 |
| 684407 | 87 | 44 | 39 | 16 | 11 | 2.4 |
| 684362 | 97 | 58 | 43 | 18 | 11 | 4.2 |
| 684318 | 100 | 53 | 37 | 25 | 7 | 3.9 |
| 684380 | 110 | 58 | 53 | 25 | 14 | 6.9 |
| 684571 | 98 | 60 | 46 | 16 | 9 | 4.4 |
| 684356 | 79 | 65 | 83 | 22 | 22 | 9.3 |
| 684462 | 93 | 69 | 40 | 41 | 9 | 6.3 |
| 684338 | 86 | 56 | 70 | 31 | 13 | 6.6 |
| 684366 | 118 | 54 | 42 | 24 | 16 | 6.4 |
| 684299 | 106 | 75 | 64 | 24 | 13 | 9.2 |
| 684396 | 95 | 62 | 25 | 67 | 6 | 3.6 |

TABLE 78
Dose-dependent reduction of human
PMP22 RNA expression in K-562 cells

| | PMP22 RNA Expression | | | | |
|---|---|---|---|---|---|
| Compound | (% Control) | | | | IC₅₀ |
| ID | 0.56 μM | 1.7 μM | 5 μM | 15 μM | (μM) |
| 684266 | 91 | 61 | 35 | 14 | 2.9 |
| 684267 | 73 | 38 | 31 | 11 | 1.5 |
| 684277 | 62 | 39 | 22 | 12 | 1.0 |
| 684277 | 74 | 58 | 43 | 37 | 3.8 |
| 684462 | 96 | 64 | 36 | 12 | 3.1 |
| 684571 | 78 | 65 | 49 | 11 | 3.0 |
| 718275 | 66 | 59 | 34 | 17 | 2.0 |
| 718279 | 91 | 67 | 63 | 18 | 4.7 |
| 718300 | 78 | 66 | 39 | 18 | 2.9 |
| 718314 | 82 | 55 | 25 | 24 | 2.4 |
| 718316 | 75 | 79 | 49 | 34 | 5.6 |
| 718356 | 80 | 71 | 27 | 13 | 2.6 |
| 718358 | 99 | 79 | 52 | 22 | 5.0 |
| 718359 | 77 | 57 | 33 | 9 | 2.2 |
| 718360 | 60 | 42 | 18 | 13 | 1.0 |
| 718361 | 96 | 93 | 97 | 82 | >15 |
| 718392 | 95 | 72 | 46 | 19 | 4.0 |
| 718393 | 85 | 61 | 35 | 13 | 2.7 |
| 718396 | 108 | 85 | 35 | 21 | 4.5 |

### Example 9: Effect of 3-10-3 cEt Gapmer Modified Oligonucleotides on Human PMP22 In Vitro, Multiple Doses

[0383] Modified oligonucleotides selected from the examples above were tested at various doses in A549 cells. Cells were plated at a density of 15,000 cells per well and treated by electroporation with various modified oligonucleotides, as specified in the tables below. After a treatment period of approximately 24 hours, total RNA was isolated from the cells and PMP22 RNA levels were measured by quantitative real-time PCR. Human

[0384] PMP22 primer probe set RTS35670, described herein above, was used to measure RNA levels. In addition to RTS35670, human primer-probe sets RTS35668 (forward sequence GCAATGGACACGCAACTG, designated herein as SEQ ID NO: 18; reverse sequence GGACAGACTGCAGCCATT, designated herein as SEQ ID NO: 19; probe sequence TGAGAAACAGTGGTGGACATTTCCTGAG, designated herein as SEQ ID NO: 20), and RTS35669 (forward sequence CTGGTCTGGCTTCAGTTACAG, designated herein as SEQ ID NO: 21; reverse sequence CCAAATGCAAGGGATGTTAAGG, designated herein as SEQ ID NO: 22; probe sequence TTGGAAGCTGCAGGCTTAGTCTGT, designated herein as SEQ ID NO: 23) were also used to measure the efficacy and potency of some compounds. PMP22 RNA levels were adjusted according to total RNA content, as measured by RIBOGREEN®. Results are presented in the tables below as percent PMP22 RNA levels relative to untreated control cells. The half maximal inhibitory concentration (ICso) of each modified oligonucleotide is also presented. ICso was calculated using a linear regression on a log/linear plot of the data in excel. The modified oligonucleotides marked with an asterisk (*) are complementary to the amplicon region of the primer probe set. Additional assays may be used to measure the potency and efficacy of the modified oligonucleotides targeting the amplicon region. ‘N.D.’ (‘no data’) indicates that the % inhibition was not determined for that particular modified oligonucleotide in that particular experiment. ‘N.C.’ (“no calculation”) indicates that the range of concentrations tested was not sufficient for an accurate calculation of IC₅₀.

TABLE 79
Dose-dependent reduction of human
PMP22 RNA expression in A549 cells

| | | |
|---|---|---|
| | PMP22 RNA Expression | |
| Compound | (% Control) RTS35670 | IC₅₀ |

| ID | 0.125 μM | 0.5 μM | 2 μM | 8 μM | (μM) |
|---|---|---|---|---|---|
| 684129 | 102 | 51 | 47 | 25 | 1.4 |
| 684133 | 77 | 66 | 14 | 2 | 0.6 |
| 684139 | 61 | 95 | 83 | 27 | 7.6 |
| 684140 | 135 | 90 | 73 | 34 | 4.2 |
| 684376 | 51 | 69 | 19 | 15 | 0.4 |
| 684394 | 66 | 49 | 9 | 7 | 0.3 |
| 823764 | 51 | 75 | 14 | 6 | 0.4 |
| 866378 | 74 | 53 | 20 | 7 | 0.5 |
| 866379 | 58 | 68 | 29 | 11 | 0.5 |
| 866411 | 85 | 60 | 13 | N.D. | 0.5 |
| 866431* | 16 | 8 | 3 | 2 | N.C. |
| 866458 | 110 | 67 | 37 | 15 | 1.4 |
| 866460 | 102 | 43 | 15 | 7 | 0.7 |
| 866480 | 132 | 53 | 23 | 8 | 1.2 |
| 866495 | 91 | 82 | 45 | 5 | 1.3 |
| 866504 | 92 | 66 | 20 | 7 | 0.8 |
| 866507 | 113 | 87 | 49 | 32 | 2.7 |
| 885950 | 27 | 29 | 7 | 3 | N.C. |

TABLE 80
Dose-dependent reduction of human
PMP22 RNA expression in A549 cells

| | | |
|---|---|---|
| | PMP22 RNA Expression | |
| Compound | (% Control) RTS35670 | IC₅₀ |

| ID | 0.125 μM | 0.5 μM | 2 μM | 8 μM | (μM) |
|---|---|---|---|---|---|
| 684394 | 115 | 71 | 23 | 17 | 1.3 |
| 866532 | 69 | 58 | 17 | 8 | 0.5 |
| 866540 | 118 | 58 | 31 | 13 | 1.2 |
| 866542 | 48 | 100 | 33 | 12 | 0.9 |
| 866578 | 67 | 72 | 48 | 6 | 0.9 |
| 885426* | 79 | 103 | 39 | 12 | 1.5 |
| 885433* | 49 | 92 | 50 | 8 | 1.0 |
| 885438* | 67 | 73 | 44 | 11 | 0.9 |
| 885440* | 115 | 150 | 82 | 44 | N.C. |
| 885446* | 29 | 32 | 23 | 7 | N.C. |
| 885447* | 46 | 45 | 33 | 8 | N.C. |
| 885448* | 70 | 39 | 9 | 5 | 0.3 |
| 885449* | 103 | 58 | 23 | 7 | 0.9 |
| 885450* | 129 | 126 | 59 | 18 | 3.2 |
| 885453* | 24 | 36 | 19 | 6 | N.C. |
| 885455* | 48 | 40 | 25 | 6 | N.C. |
| 885456* | 83 | 41 | 24 | 15 | 0.6 |
| 885476 | 133 | 81 | 34 | 6 | 1.6 |
| 885509 | 253 | 153 | 58 | 14 | 3.3 |

TABLE 81
Dose-dependent reduction of human
PMP22 RNA expression in A549 cells

| | | |
|---|---|---|
| | PMP22 RNA Expression | |
| Compound | (% Control) RTS35670 | IC₅₀ |

| ID | 0.125 μM | 0.5 μM | 2 μM | 8 μM | (μM) |
|---|---|---|---|---|---|
| 684394 | 106 | 69 | 14 | 3 | 0.9 |
| 885539 | 97 | 53 | 35 | 15 | 1.0 |
| 885545 | 84 | 77 | 23 | 4 | 0.9 |
| 885557 | 90 | 88 | 30 | 29 | 1.7 |
| 885558 | 129 | 86 | 52 | 67 | N.C. |
| 885569 | 204 | 119 | 129 | 60 | N.C. |
| 885573 | 115 | 64 | 31 | 5 | 1.2 |
| 885578 | 128 | 47 | 10 | 5 | 0.9 |
| 885595 | 151 | 143 | 64 | 20 | 3.7 |
| 885598 | 76 | 55 | 33 | 11 | 0.7 |
| 885601 | 30 | 34 | 6 | 2 | N.C. |
| 885605 | 112 | 87 | 68 | 26 | 3.2 |
| 885608 | 117 | 121 | 75 | 34 | 5.6 |
| 885610 | 117 | 105 | 93 | 18 | 4.4 |
| 885611 | 119 | 87 | 83 | 21 | 3.6 |
| 885612 | 146 | 128 | 97 | 65 | N.C. |
| 885619 | 175 | 148 | 92 | 34 | 6.0 |
| 885626 | 99 | 104 | 49 | 19 | 2.3 |
| 885627 | 97 | 82 | 33 | 11 | 1.3 |

TABLE 82
Dose-dependent reduction of human
PMP22 RNA expression in A549 cells

| | | |
|---|---|---|
| | PMP22 RNA Expression | |
| Compound | (% Control) RTS35670 | IC₅₀ |

| ID | 0.125 μM | 0.5 μM | 2 μM | 8 μM | (μM) |
|---|---|---|---|---|---|
| 684394 | 149 | 48 | 11 | 3 | 1.1 |
| 885628 | 94 | 43 | 7 | 7 | 0.6 |
| 885640 | 111 | 65 | 28 | 13 | 1.2 |
| 885645 | 34 | 31 | 15 | 5 | N.C. |
| 885646 | 129 | 71 | 30 | 2 | 1.3 |
| 885647 | 79 | 49 | 37 | 19 | 0.7 |
| 885648 | 97 | 52 | 26 | 17 | 0.9 |
| 885658 | 146 | 112 | 35 | 3 | 1.9 |
| 885662 | 105 | 43 | 29 | 12 | 0.9 |
| 885665 | 86 | 75 | 67 | 29 | 2.9 |
| 885668 | 79 | 97 | 118 | 26 | N.C. |
| 885671 | 104 | 89 | 77 | 30 | 4.4 |
| 885674 | 115 | 88 | 36 | 10 | 1.6 |
| 885680 | 167 | 104 | 43 | 15 | 2.4 |
| 885683 | 167 | 87 | 53 | 8 | 2.2 |
| 885688 | 139 | 99 | 59 | 32 | 3.5 |
| 885695 | 111 | 92 | 56 | 20 | 2.5 |
| 885696 | 113 | 69 | 39 | 21 | 1.6 |
| 885700 | 108 | 81 | 38 | 14 | 1.6 |

TABLE 83
Dose-dependent reduction of human
PMP22 RNA expression in A549 cells

| | | |
|---|---|---|
| | PMP22 RNA Expression | |
| Compound | (% Control) RTS35670 | IC₅₀ |

| ID | 0.125 μM | 0.5 μM | 2 μM | 8 μM | (μM) |
|---|---|---|---|---|---|
| 684394 | 72 | 62 | 65 | 15 | 1.3 |
| 885701 | 56 | 43 | 16 | N.D. | 0.2 |
| 885702 | 77 | 52 | 20 | 15 | 0.6 |
| 885704 | 68 | 49 | 36 | 26 | 0.6 |
| 885709 | 58 | 52 | 13 | 10 | 0.3 |
| 885710 | 94 | 45 | 28 | 6 | 0.7 |
| 885711 | 91 | 58 | 22 | 6 | 0.8 |
| 885717 | 45 | 30 | 7 | 3 | N.C. |
| 885718 | 52 | 54 | 11 | 11 | 0.2 |
| 885732 | 90 | 84 | 56 | 17 | 1.9 |
| 885740 | 102 | 73 | 19 | 11 | 1.0 |
| 885755 | 115 | 67 | 44 | 22 | 1.7 |
| 885769 | 63 | 71 | 48 | 21 | 1.1 |
| 885771 | 89 | 111 | 101 | 60 | N.C. |
| 885777 | 111 | 95 | 78 | 9 | 2.7 |
| 885800 | 95 | 84 | 67 | 10 | 2.0 |
| 885806 | 101 | 138 | 112 | 73 | N.C. |
| 885863* | 70 | 88 | 77 | 34 | 7.3 |
| 885903 | 58 | 57 | 50 | 28 | 0.8 |

TABLE 84
Dose-dependent reduction of human
PMP22 RNA expression in A549 cells

| | | |
|---|---|---|
| | PMP22 RNA Expression | |
| Compound | (% Control) RTS35670 | IC₅₀ |

| ID | 0.125 μM | 0.5 μM | 2 μM | 8 μM | (μM) |
|---|---|---|---|---|---|
| 684394 | 96 | 94 | 67 | 23 | 3.1 |
| 885904 | 72 | 101 | 37 | 7 | 1.3 |
| 885906 | 66 | 79 | 60 | 9 | 1.3 |
| 885922 | 79 | 79 | 50 | 13 | 1.4 |
| 885925 | 111 | 101 | 59 | 11 | 2.3 |
| 885926 | 74 | 78 | 39 | 13 | 1.1 |
| 885927 | 71 | 73 | 46 | 18 | 1.2 |
| 885928 | 94 | 64 | 54 | 29 | 2.0 |
| 885929 | 72 | 49 | 17 | 7 | 0.4 |
| 885932 | 89 | 64 | 51 | 20 | 1.5 |
| 885933 | 80 | 78 | 37 | 26 | 1.4 |
| 885938 | 76 | 55 | 13 | 13 | 0.5 |
| 885939 | 89 | 80 | 53 | 12 | 1.6 |
| 885940 | 91 | 58 | 48 | 30 | 1.6 |
| 885941 | 83 | 67 | 42 | 16 | 1.1 |
| 885942 | 78 | 71 | 35 | 15 | 1.0 |
| 885943 | 84 | 91 | 42 | 10 | 1.4 |
| 885947 | 44 | 47 | 19 | 10 | N.C. |
| 885951 | 69 | 32 | 15 | 12 | 0.3 |

TABLE 85
Dose-dependent reduction of human
PMP22 RNA expression in A549 cells

| | | |
|---|---|---|
| | PMP22 RNA Expression | |
| Compound | (% Control) RTS35670 | IC₅₀ |

| ID | 0.125 μM | 0.5 μM | 2 μM | 8 μM | (μM) |
|---|---|---|---|---|---|
| 684394 | 134 | 122 | 70 | 49 | 7.3 |
| 885952 | 104 | 76 | 82 | 14 | 2.7 |
| 885953 | 89 | 55 | 26 | 5 | 0.7 |
| 885981 | 137 | 71 | 50 | 21 | 2.1 |
| 885982 | 99 | 74 | 30 | 13 | 1.2 |
| 885994 | 172 | 100 | 48 | 19 | 2.6 |
| 885995 | 128 | 86 | 92 | 16 | 3.6 |
| 886001 | 104 | 77 | 39 | 9 | 1.4 |
| 886005 | 127 | 84 | 74 | 35 | 4.3 |
| 886007 | 119 | 107 | 124 | 45 | N.C. |
| 886033 | 89 | 89 | 74 | 54 | N.C. |
| 886053 | 92 | 117 | 51 | 17 | 2.5 |
| 886060 | 121 | 108 | 98 | 19 | 5.0 |
| 886078 | 107 | 83 | 99 | 57 | N.C. |
| 886089 | 83 | 96 | 35 | 20 | 1.6 |
| 886092 | 157 | 127 | 73 | 36 | 5.0 |
| 886101 | 119 | 117 | 95 | 48 | N.C. |
| 886108 | 94 | 91 | 68 | 75 | N.C. |
| 886110 | 106 | 67 | 32 | 19 | 1.3 |

TABLE 86
Dose-dependent reduction of human
PMP22 RNA expression in A549 cells

| | | |
|---|---|---|
| | PMP22 RNA Expression | |
| Compound | (% Control) RTS35670 | IC₅₀ |

| ID | 0.125 μM | 0.5 μM | 2 μM | 8 μM | (μM) |
|---|---|---|---|---|---|
| 684394 | 125 | 138 | 65 | 29 | 4.5 |
| 886116 | 79 | 45 | 8 | N.D. | 0.4 |
| 886117 | 80 | 61 | 11 | 2 | 0.6 |
| 886118 | 135 | 82 | 26 | 8 | 1.5 |
| 886122 | 142 | 121 | 58 | 28 | 3.5 |
| 886123 | 102 | 106 | 22 | 5 | 1.4 |
| 886131 | 97 | 108 | 17 | 4 | 1.3 |
| 886133 | 121 | 120 | 33 | 4 | 1.8 |
| 886134 | N.D. | 113 | 87 | 9 | 3.4 |
| 886135 | 89 | 74 | 23 | 3 | 0.9 |
| 886139 | 47 | 64 | 14 | 6 | 0.2 |
| 886141 | 102 | 111 | 55 | 16 | 2.5 |
| 886146 | 140 | 78 | 24 | 9 | 1.5 |
| 886157 | 118 | 112 | 28 | 10 | 1.8 |
| 886159 | 179 | 116 | 58 | 8 | 2.7 |
| 886160 | 282 | 159 | 87 | 35 | 4.7 |
| 886168 | 131 | 115 | 30 | 2 | 1.8 |
| 886178 | 132 | 75 | 17 | 8 | 1.3 |
| 886179 | 114 | 47 | 9 | 6 | 0.8 |

TABLE 87
Dose-dependent reduction of human
PMP22 RNA expression in A549 cells

| | | |
|---|---|---|
| | PMP22 RNA Expression | |
| Compound | (% Control) RTS35670 | IC₅₀ |

| ID | 0.125 μM | 0.5 μM | 2 μM | 8 μM | (μM) |
|---|---|---|---|---|---|
| 684394 | 78 | 30 | 8 | 9 | 0.3 |
| 886180 | 58 | 45 | 21 | 23 | 0.2 |
| 886197 | 60 | 65 | 35 | 10 | 0.6 |
| 886219 | 108 | 72 | 54 | 7 | 1.6 |
| 886221 | 85 | 64 | 36 | 23 | 1.1 |
| 886226 | 93 | 115 | 63 | 12 | 2.7 |
| 886227 | 86 | 83 | 47 | 34 | 2.4 |
| 886230 | 92 | 71 | 32 | 7 | 1.0 |
| 886241 | 86 | 109 | 90 | 23 | 6.1 |
| 886251 | 91 | 105 | 53 | 28 | 3.0 |
| 886252 | 83 | 100 | 36 | 23 | 1.8 |
| 886259 | 66 | 52 | 47 | 40 | 1.3 |
| 886263 | 106 | 65 | 51 | 9 | 1.4 |
| 886266 | 132 | 77 | 36 | 16 | 1.7 |
| 886272 | 76 | 48 | 19 | 11 | 0.5 |
| 886277 | 89 | 97 | 32 | 19 | 1.6 |
| 886280 | 116 | 107 | 106 | 73 | N.C. |
| 886294 | 47 | 63 | 24 | 10 | 0.3 |
| 886297 | 103 | 37 | 31 | 9 | 0.8 |

TABLE 88
Dose-dependent reduction of human
PMP22 RNA expression in A549 cells

| | | |
|---|---|---|
| | PMP22 RNA Expression | |
| Compound | (% Control) RTS35670 | IC₅₀ |

| ID | 0.125 μM | 0.5 μM | 2 μM | 8 μM | (μM) |
|---|---|---|---|---|---|
| 684394 | 66 | 22 | 8 | 3 | 0.2 |
| 886300 | 99 | 66 | 63 | 20 | 2.0 |
| 886306 | 109 | 84 | 63 | 42 | 4.7 |
| 886307 | 79 | 48 | 23 | 15 | 0.6 |
| 886308 | 84 | 71 | 33 | 9 | 1.0 |
| 886314 | 90 | 45 | 22 | 7 | 0.6 |
| 886316 | 95 | 57 | 35 | 5 | 0.9 |
| 886318 | 109 | 68 | 23 | 10 | 1.1 |
| 886320 | 78 | 54 | 30 | 28 | 0.8 |
| 886330 | 94 | 70 | 37 | 14 | 1.2 |
| 886331 | 83 | 33 | 13 | 9 | 0.4 |
| 886332 | 78 | 69 | 54 | 28 | 1.8 |
| 886335 | 74 | 71 | 42 | 17 | 1.1 |
| 886338 | 89 | 55 | 31 | 21 | 0.9 |
| 886340 | 61 | 45 | 42 | 8 | 0.4 |
| 886347 | 73 | 90 | 64 | 25 | 2.8 |
| 886348 | 89 | 92 | 31 | 11 | 1.3 |
| 886349 | 50 | 84 | 52 | 15 | 1.0 |
| 886354 | 95 | 71 | 45 | 10 | 1.3 |

TABLE 89
Dose-dependent reduction of human
PMP22 RNA expression in A549 cells

| | | |
|---|---|---|
| | PMP22 RNA Expression | |
| Compound | (% Control) RTS35670 | IC₅₀ |

| ID | 0.125 μM | 0.5 μM | 2 μM | 8 μM | (μM) |
|---|---|---|---|---|---|
| 684394 | 65 | 31 | N.D. | 12 | 0.2 |
| 886355 | 127 | 75 | 86 | 53 | N.C. |
| 886363 | 102 | 99 | 67 | 45 | 7.1 |
| 886367 | 96 | 43 | 39 | 10 | 0.9 |
| 886376 | 117 | 82 | 81 | 18 | 3.1 |
| 886377 | 86 | 88 | 69 | 10 | 2.1 |
| 886379 | 82 | 103 | 55 | 18 | 2.3 |
| 886380 | 80 | 130 | 41 | 23 | 2.7 |
| 886386 | 85 | 77 | 46 | 12 | 1.3 |
| 886392 | 104 | 109 | 55 | 17 | 2.6 |
| 886401 | 99 | 113 | 44 | 45 | 4.6 |
| 886406 | 83 | 96 | 40 | 41 | 3.2 |
| 886407 | 96 | 90 | 38 | 24 | 1.9 |
| 886409 | 101 | 36 | 26 | 10 | 0.7 |
| 886413 | 113 | 66 | 43 | 22 | 1.7 |
| 886422 | 101 | 66 | 53 | 23 | 1.8 |
| 886427 | 88 | 47 | 21 | 8 | 0.6 |
| 886432 | 108 | 66 | 53 | 12 | 1.6 |
| 886444 | 86 | 44 | 29 | 10 | 0.6 |

TABLE 90
Dose-dependent reduction of human
PMP22 RNA expression in A549 cells

| | | |
|---|---|---|
| | PMP22 RNA Expression | |
| Compound | (% Control) RTS35670 | IC₅₀ |

| ID | 0.125 μM | 0.5 μM | 2 μM | 8 μM | (μM) |
|---|---|---|---|---|---|
| 684394 | 109 | 81 | 51 | 14 | 1.8 |
| 886445 | 99 | 91 | 55 | 14 | 2.0 |
| 886447 | 66 | 77 | 16 | 5 | 0.6 |
| 886449 | 59 | 59 | 34 | 8 | 0.5 |
| 886455 | 52 | 137 | 64 | 43 | N.C. |
| 886456 | 47 | 102 | 52 | 42 | N.C. |
| 886458 | 97 | 69 | 39 | 43 | 2.4 |
| 886476 | 80 | 56 | 15 | 18 | 0.6 |
| 886477 | 98 | 50 | 30 | 6 | 0.8 |
| 886482 | 123 | 93 | 41 | 10 | 1.8 |
| 886483 | 127 | 77 | 43 | 4 | 1.5 |
| 886485 | 108 | 76 | 50 | 19 | 1.9 |
| 886489 | 88 | 37 | 10 | 18 | 0.5 |
| 886494 | 54 | 53 | 21 | 4 | 0.3 |
| 886505 | 83 | 80 | 72 | 31 | 4.1 |
| 886514 | 58 | 71 | 72 | 17 | 1.7 |
| 886523 | 66 | 39 | 19 | 13 | 0.3 |
| 886524 | 78 | 64 | 33 | 22 | 1.0 |
| 886528 | 105 | 79 | 27 | 6 | 1.2 |

TABLE 91
Dose-dependent reduction of human
PMP22 RNA expression in A549 cells

| | | |
|---|---|---|
| | PMP22 RNA Expression | |
| Compound | (% Control) RTS35670 | IC₅₀ |

| ID | 0.125 μM | 0.5 μM | 2 μM | 8 μM | (μM) |
|---|---|---|---|---|---|
| 684394 | 90 | 115 | 58 | 10 | 2.4 |
| 886530 | 62 | 54 | 24 | 6 | 0.4 |
| 886535 | 46 | 23 | 5 | 3 | N.C. |
| 886537 | 70 | 72 | 48 | 26 | 1.4 |
| 886540 | 86 | 48 | 28 | 15 | 0.7 |
| 886550 | 46 | 27 | 15 | 2 | N.C. |
| 886552 | 77 | 68 | 34 | 5 | 0.8 |
| 886562 | 87 | 38 | 20 | 13 | 0.5 |
| 886565 | 58 | 45 | 7 | 3 | 0.2 |
| 886595 | 99 | 69 | 18 | 11 | 1.0 |
| 886602 | 98 | 57 | 12 | 4 | 0.7 |
| 886603 | 79 | 72 | 15 | 4 | 0.7 |
| 886605 | 136 | 70 | 16 | 7 | 1.3 |
| 886608 | 181 | 123 | 40 | 8 | 2.4 |
| 886614 | 158 | 118 | 36 | 9 | 2.2 |
| 886627 | 89 | 98 | 29 | 24 | 1.7 |
| 886629 | 140 | 101 | 21 | 8 | 1.7 |
| 886630 | 114 | 70 | 45 | 19 | 1.7 |
| 886633 | 148 | 65 | 46 | 6 | 1.7 |

TABLE 92
Dose-dependent reduction of human
PMP22 RNA expression in A549 cells

| | | |
|---|---|---|
| | PMP22 RNA Expression | |
| Compound | (% Control) RTS35670 | IC₅₀ |

| ID | 0.125 μM | 0.5 μM | 2 μM | 8 μM | (μM) |
|---|---|---|---|---|---|
| 684394 | 71 | 32 | 18 | 7 | 0.3 |
| 886648 | 60 | 56 | 39 | 9 | 0.5 |
| 886650 | 82 | 75 | 57 | 6 | 1.3 |
| 886652 | 73 | 52 | 31 | 20 | 0.6 |
| 886653 | 26 | 64 | 23 | 31 | N.C. |
| 886659 | 55 | 17 | 14 | 8 | N.C. |
| 886664 | 81 | 39 | 24 | 13 | 0.5 |
| 886668 | 57 | 47 | 8 | 9 | 0.2 |
| 886671 | 64 | 61 | 16 | 6 | 0.4 |
| 886690 | 117 | 94 | 12 | 18 | 1.5 |
| 886698 | 127 | 69 | 17 | 11 | 1.2 |
| 886707 | 107 | 62 | 8 | 5 | 0.8 |
| 886710 | 73 | 55 | 13 | 4 | 0.5 |
| 886711 | 106 | 53 | 15 | 3 | 0.8 |
| 886714 | 84 | 43 | 5 | 9 | 0.5 |
| 886723 | 75 | 48 | 9 | 3 | 0.4 |
| 886728 | 91 | 107 | 26 | 9 | 1.4 |
| 886730 | 83 | 37 | 15 | 6 | 0.5 |
| 886732 | 104 | 64 | 71 | 32 | 3.3 |

TABLE 93
Dose-dependent reduction of human
PMP22 RNA expression in A549 cells

| | | |
|---|---|---|
| | PMP22 RNA Expression | |
| Compound | (% Control) RTS35670 | IC₅₀ |

| ID | 0.125 μM | 0.5 μM | 2 μM | 8 μM | (μM) |
|---|---|---|---|---|---|
| 684394 | 74 | 16 | 21 | 8 | 0.2 |
| 886739 | 77 | 62 | 54 | 19 | 1.2 |
| 886750 | 81 | 27 | 26 | 30 | 0.4 |
| 886757 | 59 | 94 | N.D. | N.D. | N.C. |
| 886758 | 86 | 99 | 19 | 48 | 2.5 |
| 886761 | 76 | 57 | 43 | 40 | 1.6 |
| 886764 | 45 | 61 | 28 | 28 | 0.2 |
| 886783 | 48 | 74 | 39 | N.D. | 0.3 |
| 886784 | 96 | 107 | 33 | 12 | 1.7 |
| 886786 | 57 | 102 | 103 | 29 | N.C. |
| 886789 | 124 | 92 | 28 | 63 | 4.4 |
| 886791 | 103 | 74 | 15 | 23 | 1.2 |
| 886795 | 105 | 86 | 40 | 29 | 2.1 |
| 886797 | 96 | 65 | 30 | N.D. | 0.9 |
| 886798 | 89 | 71 | 50 | 17 | 1.5 |
| 886799 | 87 | 43 | 17 | 18 | 0.6 |
| 886812 | 87 | 92 | 40 | 65 | N.C. |
| 886814 | 125 | 141 | 44 | 32 | 3.7 |
| 886837 | 113 | 90 | 93 | 47 | N.C. |

TABLE 94
Dose-dependent reduction of human
PMP22 RNA expression in A549 cells

| | | |
|---|---|---|
| | PMP22 RNA Expression | |
| Compound | (% Control) RTS35670 | IC₅₀ |

| ID | 0.125 μM | 0.5 μM | 2 μM | 8 μM | (μM) |
|---|---|---|---|---|---|
| 684394 | 157 | 36 | 16 | 2 | 1.1 |
| 886671 | 63 | 36 | 28 | N.D. | 0.3 |
| 886690 | 181 | 64 | 34 | 5 | 1.7 |
| 886698 | 113 | 71 | 18 | 14 | 1.2 |
| 886707 | 97 | 38 | 7 | 29 | 0.7 |
| 886710 | 69 | 61 | N.D. | 11 | 0.6 |
| 886711 | 121 | 66 | 33 | 5 | 1.3 |
| 886714 | 105 | 41 | 12 | 16 | 0.7 |
| 886723 | 67 | 45 | 14 | 12 | 0.3 |
| 886728 | 163 | 88 | 27 | 17 | 1.9 |
| 886730 | 183 | 26 | 5 | 5 | 1.1 |
| 886732 | 179 | 112 | 29 | 29 | 2.6 |
| 886842 | 35 | 25 | 30 | 10 | N.C. |
| 886843 | 42 | 51 | 23 | N.D. | N.C. |
| 886860 | 45 | 22 | 22 | 13 | N.C. |
| 886870 | 33 | 20 | 10 | N.D. | N.C. |
| 886877 | 88 | 27 | 6 | N.D. | 0.4 |
| 886934 | 46 | 102 | 34 | 35 | 1.8 |
| 886945 | 46 | 23 | 16 | 8 | N.C. |

TABLE 95
Dose-dependent reduction of human
PMP22 RNA expression in A549 cells

| | | |
|---|---|---|
| | PMP22 RNA Expression | |
| Compound | (% Control) RTS35669 | IC₅₀ |

| ID | 0.125 μM | 0.5 μM | 2 μM | 8 μM | (μM) |
|---|---|---|---|---|---|
| 684129 | 55 | 51 | 51 | 48 | 2.2 |
| 684133 | 97 | 66 | 39 | 57 | 4.0 |
| 684139 | 131 | 120 | 85 | 58 | N.C. |
| 684140 | 74 | 65 | 66 | 28 | 2.3 |
| 684376 | 94 | 99 | 55 | 35 | 3.7 |
| 684394 | 66 | 47 | 53 | 31 | 0.9 |
| 823764 | 96 | 94 | 63 | 46 | 6.7 |
| 866378 | 67 | 85 | 76 | 43 | N.C. |
| 866379 | 68 | 81 | 69 | 22 | 2.5 |
| 866411 | 48 | 89 | 28 | 106 | N.C. |
| 866431 | 158 | 97 | 109 | 55 | N.C. |
| 866458 | 78 | 93 | 57 | 79 | N.C. |
| 866460 | 72 | 75 | 76 | 46 | N.C. |
| 866480 | 78 | 144 | 97 | 66 | N.C. |
| 866495 | 120 | 68 | 68 | 89 | N.C. |
| 866504 | 41 | 68 | 51 | 34 | 0.6 |
| 866507 | 108 | 60 | 55 | 53 | N.C. |
| 885950 | 37 | 39 | 49 | 47 | N.C. |

TABLE 96
Dose-dependent reduction of human
PMP22 RNA expression in A549 cells

| | | |
|---|---|---|
| | PMP22 RNA Expression | |
| Compound | (% Control) RTS35669 | IC₅₀ |

| ID | 0.125 μM | 0.5 μM | 2 μM | 8 μM | (μM) |
|---|---|---|---|---|---|
| 684394 | 40 | 32 | 29 | 42 | N.C. |
| 866532 | 44 | 63 | 25 | 17 | 0.2 |
| 866540 | 52 | 55 | 64 | 17 | 0.6 |
| 866542 | 128 | 75 | 57 | 43 | 3.8 |
| 866578 | 96 | 74 | 48 | 11 | 1.4 |
| 885426 | 83 | 121 | 83 | 36 | N.C. |
| 885433 | 110 | 89 | 56 | 40 | 3.9 |
| 885438 | 96 | 69 | 57 | 46 | 4.4 |
| 885440 | 86 | 68 | 61 | 88 | N.C. |
| 885446 | 85 | 77 | 53 | 38 | 3.0 |
| 885447 | 122 | 110 | 58 | 51 | N.C. |
| 885448 | 82 | 133 | 131 | 92 | N.C. |
| 885449 | 101 | 83 | 46 | 36 | 2.7 |
| 885450 | 115 | 76 | 59 | 32 | 2.9 |
| 885453 | 76 | 106 | 61 | 31 | 4.1 |
| 885455 | 87 | 96 | 76 | 52 | N.C. |
| 885456 | 69 | 68 | 64 | 58 | N.C. |
| 885476 | 80 | 79 | 55 | 41 | 3.8 |
| 885509 | 92 | 78 | 43 | 24 | 1.7 |

### Example 10: Effect of 3-10-3 cEt Gapmer Modified Oligonucleotides on Human PMP22 In Vitro, Multiple Doses

[0385] Modified oligonucleotides described above were tested at various doses in A549 cells. Cells were plated at a density of 15,000 cells per well and treated by electroporation with various modified oligonucleotides, as specified in the tables below. After a treatment period of approximately 24 hours, total RNA was isolated from the cells and PMP22 RNA levels were measured by quantitative real-time PCR. Human PMP22 primer probe set RTS35670, described herein above, was used to measure RNA levels. PMP22 RNA levels were adjusted according to total RNA content, as measured by RIBOGREEN®. Results are presented in the tables below as percent PMP22 RNA levels relative to untreated control cells. The half maximal inhibitory concentration (ICso) of each modified oligonucleotide is also presented. ICso was calculated using a linear regression on a log/linear plot of the data in excel. The modified oligonucleotides marked with an asterisk (*) are complementary to the amplicon region of the primer probe set. Additional assays may be used to measure the potency and efficacy of the modified oligonucleotides targeting the amplicon region.

TABLE 97
Dose-dependent reduction of human
PMP22 RNA expression in A549 cells

| | | |
|---|---|---|
| | PMP22 RNA Expression | |
| Compound | (% Control) | IC₅₀ |

| ID | 0.4 μM | 1.3 μM | 4 μM | 12 μM | (μM) |
|---|---|---|---|---|---|
| 684394 | 34 | 21 | 14 | 1 | N.C. |
| 923857 | 97 | 60 | 40 | 10 | 2.5 |
| 923868 | 73 | 48 | 43 | 28 | 2.0 |
| 923877 | 66 | 49 | 21 | 7 | 1.1 |
| 923878 | 74 | 53 | 24 | 17 | 1.5 |
| 923889 | 78 | 56 | 29 | 21 | 1.9 |
| 923898 | 63 | 49 | 31 | 11 | 1.1 |
| 923906 | 61 | 45 | 16 | 18 | 0.8 |
| 923918 | 67 | 48 | 23 | 9 | 1.1 |
| 923927 | 71 | 43 | 29 | 27 | 1.3 |
| 923956 | 60 | 29 | 37 | 8 | 0.7 |
| 923997 | 79 | 66 | 42 | 16 | 2.4 |
| 924016 | 69 | 47 | 17 | 7 | 1.1 |
| 924017 | 78 | 39 | 44 | 20 | 1.7 |
| 924018 | 68 | 54 | 39 | 20 | 1.7 |
| 924247 | 115 | 59 | 42 | 38 | 4.2 |
| 924257 | 75 | 40 | 24 | 11 | 1.2 |
| 924337 | 104 | 63 | 57 | 20 | 3.7 |
| 924338 | 96 | 68 | 50 | 36 | 4.6 |

TABLE 98
Dose-dependent reduction of human
PMP22 RNA expression in A549 cells

| | | |
|---|---|---|
| | PMP22 RNA Expression | |
| Compound | (% Control) | IC₅₀ |

| ID | 0.4 μM | 1.3 μM | 4 μM | 12 μM | (μM) |
|---|---|---|---|---|---|
| 684394 | 38 | 16 | 6 | 1 | N.C. |
| 886954 | 60 | 34 | 20 | 3 | 0.7 |
| 923870 | 79 | 41 | 16 | 10 | 1.2 |
| 923881 | 74 | 55 | 17 | 13 | 1.4 |
| 923899 | 44 | 22 | 16 | 12 | N.C. |
| 923900 | 39 | 28 | 14 | 7 | N.C. |
| 923909 | 84 | 38 | 35 | 3 | 1.5 |
| 923910 | 60 | 34 | 17 | 6 | 0.6 |
| 923928 | 81 | 90 | 30 | 15 | 2.8 |
| 923939 | 84 | 72 | 52 | 27 | 3.8 |
| 923959 | 72 | 36 | 22 | 10 | 1.0 |
| 923990 | 62 | 41 | 32 | 12 | 0.9 |
| 924050 | 84 | 68 | 57 | 33 | 4.7 |
| 924299 | 70 | 43 | 26 | 5 | 1.1 |
| 924359 | 67 | 45 | 23 | 16 | 1.1 |
| 924370 | 61 | 46 | 33 | 14 | 1.0 |
| 924389 | 84 | 50 | 22 | 12 | 1.6 |
| 924509 | 53 | 35 | 12 | 4 | 0.5 |
| 924510 | 69 | 48 | 34 | 20 | 1.4 |

TABLE 99
Dose-dependent reduction of human
PMP22 RNA expression in A549 cells

| | | |
|---|---|---|
| | PMP22 RNA Expression | |
| Compound | (% Control) | IC₅₀ |

| ID | 0.4 μM | 1.3 μM | 4 μM | 12 μM | (μM) |
|---|---|---|---|---|---|
| 684394 | 63 | 27 | 7 | 2 | 0.6 |
| 923843 | 66 | 47 | 27 | 19 | 1.1 |
| 923862 | 79 | 45 | 31 | 12 | 1.5 |
| 923962 | 60 | 44 | 27 | 8 | 0.9 |
| 923971 | 64 | 26 | 19 | 2 | 0.7 |
| 924001 | 45 | 25 | 10 | 3 | N.C. |
| 924002 | 53 | 40 | 19 | 2 | 0.6 |
| 924021 | 85 | 66 | 47 | 8 | 2.5 |
| 924022 | 67 | 44 | 23 | 10 | 1.0 |
| 924031 | 83 | 71 | 27 | 6 | 2.0 |
| 924092 | 82 | 54 | 60 | 37 | 4.6 |
| 924211 | 73 | 57 | 35 | 9 | 1.6 |
| 924272 | 77 | 38 | 34 | 9 | 1.3 |
| 924303 | 81 | 73 | 31 | 21 | 2.5 |
| 924441 | 76 | 61 | 21 | 16 | 1.7 |
| 924463 | 82 | 68 | 37 | 16 | 2.4 |
| 924471 | 65 | 36 | 20 | 16 | 0.8 |
| 924480 | 98 | 71 | 46 | 17 | 3.2 |
| 924523 | 101 | 51 | 41 | 11 | 2.4 |

TABLE 100
Dose-dependent reduction of human
PMP22 RNA expression in A549 cells

| | | |
|---|---|---|
| | PMP22 RNA Expression | |
| Compound | (% Control) | IC₅₀ |

| ID | 0.4 μM | 1.3 μM | 4 μM | 12 μM | (μM) |
|---|---|---|---|---|---|
| 684394 | 46 | 34 | 14 | 12 | N.C. |
| 923846 | 51 | 47 | 27 | 23 | 0.6 |
| 923894 | 57 | 65 | 40 | 11 | 1.5 |
| 924015 | 94 | 58 | 37 | 13 | 2.4 |
| 924025 | 86 | 65 | 40 | 19 | 2.6 |
| 924043 | 75 | 51 | 27 | 28 | 1.7 |
| 924055 | 65 | 54 | 35 | 26 | 1.6 |
| 924085 | 84 | 51 | 45 | 16 | 2.2 |
| 924105 | 87 | 62 | 72 | 39 | 7.7 |
| 924203 | 89 | 66 | 48 | 18 | 3.0 |
| 924335 | 101 | 73 | 47 | 28 | 4.0 |
| 924345 | 118 | 105 | 83 | 49 | N.C. |
| 924354 | 107 | 79 | 65 | 24 | 5.1 |
| 924355 | 105 | 78 | 94 | 51 | N.C. |
| 924364 | 93 | 85 | 36 | 32 | 4.0 |
| 924415 | 89 | 59 | 31 | 21 | 2.3 |
| 924444 | 114 | 100 | 62 | 48 | 9.9 |
| 924484 | 75 | 57 | 26 | 6 | 1.5 |
| 924565 | 90 | 66 | 45 | 41 | 4.6 |

### Example 11: Effect of 3-10-3 cEt Modified Oligonucleotides on Human PMP22 In Vitro, Multiple Doses

[0386] Modified oligonucleotides were tested for in vitro inhibition of human PMP22 in human A-549 cells. Compound 1078152 is a 3-10-3 cEt gapmer with a full phosphorothioate backbone and the sequence from 5′ to 3′ is AACCATTTATATTACA (SEQ ID NO: 4807), wherein each cytosine is a 5-methyl cytosine. Compound 1079051 is a 3-10-3 cEt gapmer with a full phosphorothioate backbone and the sequence from 5′ to 3′ is CGGGAAAGGCAGTTGC (SEQ ID NO: 4808), wherein each cytosine is a 5-methyl cytosine.

[0387] Cultured A-549 cells at a density of 15,000 cells per well were treated using electroporation with 4,000 nM of modified oligonucleotide. After a treatment period of approximately 24 hours, total RNA was isolated from the cells and PMP22 RNA levels were measured by quantitative real-time RTPCR. Human PMP22 primer probe set RTS35670, described herein above, was used to measure RNA levels. PMP22 RNA levels were adjusted according to total RNA content, as measured by RIBOGREEN®. Results are presented in the tables below as percent PMP22 RNA levels relative to untreated control cells. ICso was calculated using a linear regression on a log/linear plot of the data in excel.

TABLE 101
Dose-dependent reduction of human PMP22 RNA
expression in A549 cells

| Compound | PMP22 RNA (% Control) | | | | | IC₅₀ |
|---|---|---|---|---|---|---|
| ID | 0.03 μM | 0.1 μM | 0.4 μM | 1.8 μM | 7 μM | (μM) |
| 684267 | 96 | 42 | 30 | 30 | 8 | 0.2 |
| 684394 | 50 | 38 | 14 | N.D. | 15 | N.C. |
| 886650 | 117 | 75 | 62 | 33 | 15 | 0.8 |
| 886652 | 120 | 64 | 56 | 31 | 22 | 0.7 |
| 923866 | 96 | 89 | 50 | 36 | 7 | 0.6 |
| 923867 | 105 | 91 | 56 | 39 | 17 | 0.9 |
| 923868 | 73 | 55 | 52 | 22 | 20 | 0.3 |
| 924255 | 94 | 72 | 90 | 53 | 17 | 1.5 |
| 1078152 | 114 | 106 | 80 | 70 | 47 | 6.6 |
| 1079051 | 89 | 77 | 62 | 37 | 14 | 0.7 |

### Example 12: Effect of 3-10-3 cEt Modified Oligonucleotides on Human PMP22 in Transgenic Mice

[0388] C22 mice, described in Huxley et al., Human Molecular Genetics, 5, 563-569 (1996) and Verhamme et al., Journal of Neuropathology and Experimental Neurology, 70, 386-398 (2011), express endogenous mouse PMP22 and overexpress a human PMP22 transgene. The effect of modified oligonucleotides on human PMP22 RNA was tested in symptomatic C22 mice.

### Study 1

[0389] C22 mice were divided into groups of 3 mice each and administered 50 mg/kg of modified oligonucleotide by subcutaneous injection once a week for a total of three injections. A group of two mice was administered subcutaneous injections of PBS once a week for a total of three injections. This group serves as the control group to which other groups were compared. Mice were sacrificed 48 hours after the final injection and total RNA was isolated from the sciatic nerve for analysis. Levels of human PMP22 RNA were measured by quantitative real-time RTPCR using primer probe set RTS4579, as described herein above (Example 1). Data were normalized to the control group and are presented in the table below. These data were previously reported in Example 1, Table 2 of WO2017/156242, incorporated by reference herein.

[0390] These data demonstrate that comparator compound 684394 is more efficacious in vivo than comparator compound 684267.

TABLE 102
Reduction of human PMP22 in C22
transgenic mice, multi-dose study

| Compound ID | PMP22 RNA (% Control) |
|---|---|
| 684267 | 83 |
| 684394 | 45 |

### Study 2

[0391] C22 mice were divided into groups of 3 mice and administered 30 mg/kg of modified oligonucleotide by intravenous injection. A group of three mice was administered PBS by intravenous injection. This group serves as the control group to which other groups were compared. Two weeks post-dosing, mice were sacrificed, and total RNA was isolated from the sciatic nerve for analysis. Levels of human PMP22 RNA were measured by quantitative real-time RTPCR using primer probe set RTS4579, as described herein above (Example 1). Data were normalized to the control group and are presented in the table below. These data demonstrate that compound 923867 is more efficacious in vivo than comparator compound 684394.

TABLE 103
Reduction of human PMP22 in C22 transgenic
mice, single-dose study

| Compound ID | PMP22 RNA (% Control) |
|---|---|
| 684394 | 73 |
| 923867 | 34 |

The application's sequence listing, which the Patent Office published only in electronic form, follows.

SEQUENCE LISTING (5373 sequences)

SEQ ID NO: 1 - DNA, 1861 bp, Homo sapiens
aataaactggaaagacgcctggtctggcttcagttacagggagcaccaccagggaacatctcggggagcctggttggaagctgcaggcttagtctgtcggctgcgggtctctgactgccctgtggggagggtcttgccttaacatcccttgcatttggctgcaaagaaatctgcttggaagaaggggttacgctgtttggccgggcagaaactccgctgagcagaacttgccgccagaatgctcctcctgttgctgagtatcatcgtcctccacgtcgcggtgctggtgctgctgttcgtctccacgatcgtcagccaatggatcgtgggcaatggacacgcaactgatctctggcagaactgtagcacctcttcctcaggaaatgtccaccactgtttctcatcatcaccaaacgaatggctgcagtctgtccaggccaccatgatcctgtcgatcatcttcagcattctgtctctgttcctgttcttctgccaactcttcaccctcaccaaggggggcaggttttacatcactggaatcttccaaattcttgctggtctgtgcgtgatgagtgctgcggccatctacacggtgaggcacccggagtggcatctcaactcggattactcctacggtttcgcctacatcctggcctgggtggccttccccctggcccttctcagcggtgtcatctatgtgatcttgcggaaacgcgaatgaggcgcccagacggtctgtctgaggctctgagcgtacatagggaagggaggaagggaaaacagaaagcagacaaagaaaaaagagctagcccaaaatcccaaactcaaaccaaaccaaacagaaagcagtggaggtgggggttgctgttgattgaagatgtatataatatctccggtttataaaacctatttataacactttttacatatatgtacatagtattgtttgctttttatgttgaccatcagcctcgtgttgagccttaaagaagtagctaaggaactttacatcctaacagtataatccagctcagtatttttgttttgttttttgtttgtttgttttgttttacccagaaataagataactccatctcgccccttccctttcatctgaaagaagatacctccctcccagtccacctcatttagaaaaccaaagtgtgggtagaaaccccaaatgtccaaaagcccttttctggtgggtgacccagtgcatccaacagaaacagccgctgcccgaacctctgtgtgaagctttacgcgcacacggacaaaatgcccaaactggagcccttgcaaaaacacggcttgtggcattggcatacttgcccttacaggtggagtatcttcgtcacacatctaaatgagaaatcagtgacaacaagtctttgaaatggtgctatggatttaccattccttattatcactaatcatctaaacaactcactggaaatccaattaacaattttacaacataagatagaatggagacctgaataattctgtgtaatataaatggtttataactgcttttgtacctagctaggctgctattattactataatgagtaaatcataaagccttcatcactcccacatttttcttacggtcggagcatcagaacaagcgtctagactccttgggaccgtgagttcctagagcttggctgggtctaggctgttctgtgcctccaaggactgtctggcaatgacttgtattggccaccaactgtagatgtatatatggtgcccttctgatgctaagactccagaccttttgtttttgctttgcattttctgattttataccaactgtgtggactaagatgcattaaaataaacatcagagtaactcact

SEQ ID NO: 2 - DNA, 41000 bp, Homo sapiens
acaaataggacattaaatgatagtgtctatggaagcatgatgagaagatatgctaggaacgtgctgggcacaattaggggcacggtagaatgtgagatagtccaggctgtgagtacgggatctgtagccagaatgcctggttggaatccagcctctgtcatttctttgcagtgtgtcttgagaaagtgactgaacatctcgctgtgcctcagtttctccctcttctaaaagaggatgatggggtgcctatttcatacggttgtgaggattaagtgatttgatgcatataaaatattcaagatggtgcctggcatatgctaaacacgaagtaaatataacctattatcatcattatcaaggacttgcggataactgatgctactgagccgatggagcgtggtgtagcagaacagctcaggtgctagaaatagccagtctcattgactcaactgtgtttcctcagagaatcccgattctcatttttcctatctgtaaatggaagggaggatagcaaataataataaatgttatttggtgactattctatgtgtttattttgcaagaggctcagtgggatatagcctacagctttgcagagacattgctcaacacagatgcatgggataggggtcccatttggctgagaaaaggttattggaaatgggagacgaggaaggagttttcctcacctgactctgggaagggaagagagtctggcccagatgggtaaagacaagtgtgttggcatctggtagacagggccagtggcacacaacagtgaacagctctactgctgacagccaacagggacttcggggtttggctgctggagatggaggacctgggcaaaagagacgtgaggccaagagagcaggtctcagaatgtggagctcatggaaggagagagggagggctaatcagactgctcctatctggccagaagccatgccccacactcaccaggccctaccccttttcctctgaatctttagctcttagatcagaaataatcttacgtgtcttcaggcttgatcctggcctgacggacagcagcctctgtcgtgtagcctttggagctgatcatggcagtacccaggaaaagactgtctggagaggctgcaaaaaccatgctcactgttcccagtccccgtacagaccatgtcagaggaggactgagggaggctcctctctctctctctctgtcacacacacgcacacgcgcacacacacacacacagatacacgcgcacacacacacaccgttttgcctggcagaacagacttataacttgcataatactgcagcagcccacactgtacctcatctccatttgggttccacaacagaagggagctggaaggaaatcagcgacaatctaactccacatgacaacctggctggacaacgaaacatccagcggggagaaagacactggaaattacccatacctgagccccatcccaaaacacctgagtcagcttctctgaccatggcccaggctaggtcatttgcaaagctcttgagtgattctaaagaaccactgctgtgaaaaataaaaatgatttcagcaaagagagaaaggtgaaactattttattggcactggctgtgatgctggctgtgagcagatgctggctgtgggcagaacaggggagagggccattgagaggcccttgtgactggagagtccaatcaaacgtaaagtgtgtgacagggagggactcctccaaattctgcaggtctctccagactggggatccctaacacaagaggaagtcttatgccccaagtgccagaattccaggaaactcatgcaatgaaaccagtcctcttgtgtcagagtttgcagctagaagcggttcaagggatggaggactctctgggagctggagtggtacgctgcaaagaacctaaatatgccataacttcctttacttccctctccaagaatttccaattgctcttccagcctattctgcctgacaggttagaaagttttcaatagttttcaatagaggttcgtttacttgcattgaattatctcatgaaggtcagcttgattcgggcacattaaagacagagtcggaagaacacatttccctaagttttattctaatgtacaacacatgtgatcatttgcgatggggtctaggcagacaaggcaggtaacagggagtccttccaaccaggggttggaacaaaggaggcttgatttggtgactcttgagacatttggctcactgctgtgatgctgtgagagattagctgtgcaatgtttgggctccttaaaaggaagtttatttaaaataaaacttacctgcacgtatgtaacactgtagacacagatccttcccacagtatatttaatctctgcagaattcactgggaggggaggggagccagtgggacctcttggctattacacaggttggcacttccagagagaacagtcttggcatcacaggcttcaggcatactcaaagctcttctcccttctgattccagtttctccatgccctgcagggcctcttgggattattgtattctggaaagcaaacaaagttggacactgtctctttaaataatagaggctgagaacctctcaggccaccatgacatatcccagcattggaccagcccctgaataaactggaaagacgcctggtctggcttcagttacagggagcaccaccagggaacatctcggggagcctggttggaagctgcaggcttagtctgtcggctgcgggtctctgactgccctgtggggagggtcttgccttaacatcccttgcatttggctgcaaagaaatctgcttggaagaaggggttacgctgtttggccgggtgagttttattggcaaactgtgcctctgggtgatgtgtgcctatgctttacaagaattgcctaatttcccaccccctgcaagccgcaaatgaaaaggattgcaggagagatggtgcatttgtgttggaattgactggagattcagagggctttttatatccttggttaaaaggtggatatatactctggctggggaggtggggggccatctgagagcatctagaaaccctaatgcatccagattgaaaggaagaaaggaatctagatgctttttcccccatggaaaatagctgtgcacacacagctggcaggtggccttggtaagcaggttagggagaagctgccacctgtggcagagccttggccagccgggctctgggtgtggcaagcctggtcagcaggcactgagtagcacttcctctgccaccattgagaaccaggcaggaggccagaggcagtgagggacagatgggttgggtttacctgtctggcagtatatggtgtggctgtgacctgggtggttattgattaaactattgggttcaaaagaaaggaagaagcgagctgtagcacccaatatatgcacttttctgtatgtgtattagactttattaaaaagtttatttgaaaatcacaaaggaagggaaagaaaaccctgagttagatatgctcatatttctaaagtgcttacttagaacagtcctgagtatgttgtgatcacataagtgttggttaaataaataaatgtccaaatggcataaaacaaagtaataatttctagagcaaatctaacttataaaatgacctgtggaggaaagaaaacactgccatgtctttagacttttttttctacttgcatatgcactttcatttataaatctttatctatctatctatatctatctatctatctatctatctacctacctacctacctacctatcagagttacaagctactttagtgcagaggtggtcaggtcttccctgaaaggttgatgtgagagttaaatgtgatataataatagtggtggcaatttgggcactgggcccttattatgttgcagacacgatgttaactgctttgtacatattgtctccttcaatcaccaccataaacctttaaagcaggcattactatttccttttgcacctgagaaaactgaagctcagtgaacttgagaaattgcccaaattcacaacaaaagtaagcagggtgattaggtttgttggagcccagagccagagtgcctaaccactgcaccatactgcctctcacagaccatgcatataaagtccaggcaaagtgcttggcatataacgggcactgtaaatgcagtgtttacaagtacacttcattttaatctgataacacgatagttttaaaaagatcattgtttgaagatctttttcaaatttatttttacttaccgtaagaatatacaattagctaaaatagcagctcctttcaaatcgtaaaataatatagaattatttgaatcattgagagtgatgagcttctatgacacagtacactagaggtagggaagtgtgtgtgtgtgtgtgtgtgcgcgcgcgtgcgtgaactgctgcattttcaggcagaaacctttaacatccacattcctgctccctgtcccgtgcctcaaggctggcctgcgcacgggagtctcagttgggcgcgcctctgccaagccgagactgaagggggctagcctctctccctgtaacgctgggcgggccacgttaggaggctatgaatcagctgatttccttggctgctccaaccccacctcaaatggccacctcgcacccgcccgccaaaccccatggccaggactccagccaaggctgacagccaagcccgactgctgcaggaacactttgcctagagcttattcggtggtagtctggttttgcctaggctaggaggagcccaatcccagaccatgctatccagtagtcggccggacttttcttcccctaattcgcacccaagaggagcccgctagatcaatccccgccaatcctaggaagctggcatgcttcgtaggtgcagacagtaatagcggggaccggcgcggggcaggtgtgtccggctaagacgccaggacagggcaggggctccaggacccgagaggagagggacttcttccagcgctcaagcgcccgctgccctctattagtgggaaaggaatccagcctcagccccgcgcgggcgcggtcggcgtcggcgggcccagaagcccagccctgggcatccgctgagctacatttggctgggtcttcccagagtgggctgaggagccagtttctcggtcaacactaggtctccacggggccaggggagaagggaggtgggaggtgagaaagctcagccgcctctggtttcgagtaaaagtcgccgcggttttgcagggaccgactttttcttgaggcgcatttaaggccaagtgactgtctcctgccctccctctctcctgccccctctcctccctgagtcccgccctcccgcacacgctgacccagggacacaccctactgcagcgacgcaaacagggcgttgttcccgttaaaggggaacgccaggagcctcccactgcccccttgcttcgcgcgcgcgcagccccgcagcgcagctttggcggcgccagcagcggagccaacgcacccgagtttgtgtttgaggccaccctgaggatcgggacagctgttcctttgggctgtaagtgatttggtggggagagtgaaggagatggaggagaaatgtgggcatcttccagtgagggtgccagaaagcgcagcgcaggcgcggggctttggccagctccctggggcttctgtttaggggcacagggtcccctgtgtgtcctgtttccctccaatgggtcttggagtaatacaacgaggagagcctttatggtctataagaccttacagggcaagggtgatggtgctggtgtctggatagcggataagggcggcccagttctcgccttgctgaagaggcgttgactctgggacacactggcaaaacagtccctgtggcggacatcccgagagtgttggactcctgtggttccccagttcccagcctcctgccatcggcttaattcaaaccctctgggagtcatcagaaatccttgtttatttcttccagtgcattccagagtttctttgaatgtgatgcttgtggagaggaacagaggggcctgggattgggtactttccaaactgggttattgaaacgttgtctccctggcccaagactctgcctaaaatggtccccagagtctcagccagatctttcacagccatgcatgtcctctaacaggtcatcccagccttcagttcccccaaagtttaaaatgaggggcgaggaccgcattacttgggataaatgtcctgccggctctgaccggctgaaattctcggactcagccttttaccctctgtctctctctcccgtccgctggacatctactcccttcggtccaggctcctgggctcctgtcccaccgcacccagaccggagctcaggcttgttggggttcgtgtcctggctttgagtgcctggggtgcagactggacccctaggcgagcacgtgggtctagcgcaagagcagaatgccccctgaccccaggggctgcctggggaagcgcgcggtggacgggaagcgcagggtccgggcaaccctctcgagccattcttttctttccacactactctggctctgcaccacctctccggagccgccagagtctgcgcgaggctgagctggggccaggaccgttcctctacgctggcagagttgggtggaaacttggagacaaacggaatgcggagagcactggggtctgggaaaccagcctcctcgccgctgtctcccccaccgcatgccacggctgtctccaggtctcagacggaaatctgggcacctactcccctcacccctacctccaccccataggggaattcaccatctgaaccggggtctcggagaacgtgacctctcaccttccagggaggtcgccgggaggtgcttggggtgggtggaagcgtgcagtggcctctgctcatattttctggaaacccctccgttccctgggtggttttagacgtgcgaaccgcttgttttgtttccaaaagcaaaagatgttccgttgcaggcgggcccggctgggcgctgggcactgggcgctggtcctgcaggcggctgctgccccctctcggcggcaggcggcgcgaaggctcctgacccgcgcgggcggtcgggctgcgggcgctgggccaggccgggccttccgctagtgcgcgggaccctccctctgcgcgcgcctccgtcgctcggcccagtgcgttcggcctcacgcccagcgctctcctcgcaggcagaaactccgctgagcagaacttgccgccagaatgctcctcctgttgctgagtatcatcgtcctccacgtcgcggtgctggtgctgctgttcgtctccacgatcgtcagcgtgagtgcctggcggggaggctccctgcgcggcccgcccttccccatctgggttcccagcccgtgctcctgctggttcaggactgtgttatttgcagacagttggaagtctcagacgtcccagggaagtttctggcaatctgcccccttccagttgctttgagaaaacgagagcagattcagtgataggaaccaagcgagcgctgggctgggttagctgcgcaggtctctatttaagccaagtaacttcagagccgatctagggtccccgaccttcatttgacaagattgtttaacttttttttttcttgatgcagcctcgttgaagaagaggagtatttatgatttttttttctccaaaccatagtcagatgggtgaattaatttataaaacacccttttaggacttgaaattggaaagttaaaatgggcttttctggaaaagagttcacaggtcccatgtcggctttatggcatgaacacaacacattgttagtaaagcttccactggtaggaacaggccatcagagtaacttctgttacaaaactgtccagcccattagatcttaaagttattttcttggcgatgaagatgagcagacattcaggcagttttccagtggtggctttcacttcttaatttaaggcacattgtaagcatgattttctttttcgttttcttttcttttcttttctttttttttttttttttgagatggagtctccagcctgtcacccgggctggagtgcagtgccatgatcttggcttactgcaacctctgccttccgggttcaagccattctcctgcctcagcctgggattacaggtgcccgccaccacgcctggctaattttttttttttttgtatttttagtagagacggggtttcactatgttggccaggcttgtctcaaactcctgacctcatgatccgcccacctctgcctcccaaagtgctgggattacaggtgtgagccaccgtgcccggcctgtaagcatgattttctagtctctgtgagaaataattatgttggggatttgtgacttagtttaacatttacaagcatcttcacagtatctccattgtgcctggtgatgatgatatcagactgataggagctataaacaaggaaatagactgagagaggcgggcttggggaatgatcccgagatgctgggaggagagaaggcttgaatgcaggtgtctaaggttgagttcatggctccttctactatagtaaacatctctgcacataatcgtttctgtgtgcatgtggaacttctccatttacaaggtgcttttaagtcataaaacgttggctcttaccatgcaggggtgggcggtgtggctaggtggatgcgggtgcttttcgccatccctgggcctttctccttccccttttccttcactcctccctccctccctgactcaggatatctatctgattctctctagcaatggatcgtgggcaatggacacgcaactgatctctggcagaactgtagcacctcttcctcaggaaatgtccaccactgtttctcatcatcaccaaacggtgaggctggttttgtgctccatgagcttgtcctcagacgcctgtaacacgtttctcagcccagagctggaaacgcttattggaagacacaagccagaatgtcgttgctggggtggggtgggatgtgacagggagccatgagtccagggaaaatgggaggggtggtgatctcgctggggaagctgagatcctgggcatcattgtgattcactctacctagagacatgcccttagtgccctcctgatcacttaggataatgctttttgtgattgaaaaaaatatcgacctgggagctgtgaaggtggtatgatagctaagcctttggcagacccccttgggacattggatcaaacgtgtatctttggtttggtggctgtctctattcagaaatgtcctgcccctttctgctgcagtgacagtggggctagctcactgcaccgtcagttacatggacacaagactggctgcctttccaggtcttgggcctcagtgatgccacctagcatcaaaacctttgaatgtttccttgttgcaagatggggacttgaagctatttgcaaaaccctaagctaagccttggggtccttaatccagaagatcgtatttctcctctgtcctcagcatctttgcttgtgagatatggaagccaggcttcatgagggtcaaattaagggataattggcagcagaagcaccaactaggtacccaaggcacccagagggaaaggaacacccagccaggagccctgtgtgtttggatgcagacaggtggaggtaaacaggatgagctgttttggtggctgggtaggccatagcgattgatgttaagagcccgtggacctggatccacatgatcttttgttccagaagatgtgtcctcaggctggaaggacctagagatacagcagagctttcctaacatcctgggtttaaaaggccacggaaatacagctttaaatgttgctggagctactcatagatccagtatatatgttcaagatgctacaccagacgagagaaaccagtttagatccagttcagtaaaacaggcagtgaagtggcctttggtcctggctttgcataatccagttgctttgctggactttccctcttacagctcagtacccagtaatacccaagcatgtccccagctgaagcattataaaccaaattccttgaaccacagtacaaatagaaactgctaaaataataatttggtaatttacatggagaagatacgcaaggagtagaaaaccctgctttatgtttttaccttctgggttggggagggagcagagaaaaggtcccagtcctattggagtgagaacagtgcttaatcttgtctctgagtgtgtgaaaggcattgaattaaagccatcccagaaattacgtggtgggtttgcatggtgagttggcaactgagtaaatgaaatactcatgagtgcctgagaatgtgaccgtagcactgcttgtccccaaagccacagcatccggtttctccccctttagggtctggctgaagttcccggagcactccggatgggagtctccgtactcgctactgacacctggtggttacaagtagtgactcagcccgaaaagggcaggctttggtgctcacaggcgccatccccaagtggcatctggccacgcggcttggcacagaatcctggactcttgggcccggaagggggcagttttggcaggcgtgttaaaacccggcgaagtttcagcagaaacgaggcggcagaggagttgctaagttgtgcttaaaccatctgcaggaaagaaagcaatattgacctgtagcatgttacagattgacatttggtgtcttctgccgttggaaatagctgtcagttggtgctagaagcagatctcaaagaggcactagggttattttaatcaggaaacttcttatctctcaacttgttccttctgtgccaagctcatgttcttgagttcatttacaatgcctccttagtgtgggtttcaaatctgcctcgttgctttccgtgaggaccccagagtgtctgttttccacatctcccttctcagctctcacaatcagggcattttgaaaacatctggacactgcacctgaacatgctgggtttgttttcacgccactcaggcttaatctaaatttgaaatttccatttacacttccccagtagtggttatctctgccgctatcttccccaacgtggcagcacttgctacgacttcagccttaagtggcgaatcctccagggcctctttgattgagtttaacaattgtggctgcagacaataagctgaaaaaaatgtgtactttttaaaacattatactgtctttacaaatgaactatgctcattgcgaaccatttaacttgtctgtatttgctcttagaaagtatatttgaaaaaaaatacttgttaagtaatcaaaagtaatttgttattgacatcgatttgtgaagaatatgttgcaagtgtgaaaaaataaatagtggtgcaatctcggctgactacaacctccacctcctgggttcaagcgattttcctgcctcagcctcccgagtagctgggattataggcgcccaacaccacgcctggctaatttttgtatttttagtagagaggggtttcatcatgttgggcaggctggtctcgaactcctgacctcaggagatccacccacctcacctcccaaagtgctgggattagaggtgtgagccactgcgccatgtgacttggtatttttttctgaaaggactcatttttctggtgcatgaccatgacacttcacctctctctgggggttgccactcatgttgttttctacatgaatggggcctcctggcatcgtgccatgaggcagtctaacatctaggttgtgtagtttgaaagagacacaccagatcttgcccccaggctacatcttaatattagaaatagttttagatttttaactaactgactttgactccgcctgccttctcgtttttctaaatgtgtttgtatactttctggcaccccctccttatctgcctcgtgtgggcagaggtaagagaggcttagtgtggggatattcgttatgatattgtatccagtgcctctccggcccagggaatacaaggatctggaatgcatgggccttgccttgatggtcccgagcctggtcgaagagtcaggagatagatatggaagggtgaatcactcccttggaaggcagagcaggccaggtgcccaaagggaggcaggcagacagcgtctgagttcagggaggaagcggatgggaaatctctggtgggaggtagaatctgatccatcctccaaaggatgggcaggatttaagtcaatacaggcaacggggaggagaatattccctgtgacctaaggtaagggtagaacaaggcaggggatggggtagactggttggctagtgttctggttaggattaggattgattgtgtataagagaacatcttcaaatgataggggcttaagtaagatcatttatttttctctcttttcaaagaagtctggaagtaggtagcctgagagaggtatggaggttccatgaaattgtcagagatgcagacactttctagctcatttctttgccatctcttgggtttggctgtcatcttcaggaaacaaaaggctgctagagctccagccatctcatccatgattcaagcagtagggtggagaaaggaggtggggaagaatgaatctccttttcttttaatgaaatgtgacatggtcacacctacacctatttacaagagaggctgagaaatatagtcattcggccttgggggaagcatggcttttcaaatcatagaaacctggcagcaaatacctctctgtaagcctggtgtggaatactttccttgagggtttgaccatcccctcccatacccaatcatactcttttgcaatagctcagttgggccctatgcagttccataagtcccagttatttcagcattcttcaaagagtccatctctgctgcatcctgggctctgtcagccaccccaccattctcacatgggctcttctcagaaactttaggacctgttgaggcttctctctctctatttctaccacctctccaggtataagtaagtcttattattattattgagacagagtttcactcttgttgcccaggctggagttcagtggcgccatcttggctcactgcaacctccgcttcccgggttcaagcaattctcctgcctcagcctcccgggtagctgggattacaggcatgcgccaccacgcttggctaattttttgtatttttagtagagacgggctttctccatgttggtcaggctggtctcgaactcccgacctcaggtgatccacctgcctcagcctcccaaagtgctgagattacaagcgtgagccaccatgcctggccatcttattattatttaatgagtccagacctctcttctgaatcccagacctgtttatccagctgtctcctggccacttcccttgggatatctaagagaggcccccaagtcactaggccagagacagtccttatcttcctctgccaattcaacccctctgtcactttctagtattttagtgaatgctgcttcaccagccagcaagccaaacatctagagtctgccttgacttgacgcgtttccttctttctcttctcagcattgtcacgggtccctcaggccaccccattgttccaatgcctgttgcccacctgtggtcacgctgcttcctcgtttgtcagaggcgccagggcagcctcctaactagtttgcctgaaccctttcttgctcctctgtgactcatttttcatatggaatccaggctgatatttaaaaaagcacaaacctaattatatcactcctcattttgaaacctttcagaggccgttcattggtcttaatcttcagatgaaaatctttaacaaggcccatcggaatctacctgaatgatccactcctgcttctgttaagtctcacctcccatctctcttcccctcatcttggaatttcagcgttttctcacgtcctgaaatgtgaacttcccacttcgggagtctctccatttctcttctgatctttcatgcaggactatttcttgaacaactctcgtgtaccagagactattgcaggtgctaaggttacaagagtgaacaagagcttatgttttactggacaaaccagtcagtaaacatggagaatttgggggcaatggtaagaactatataagacagggtaatgggataaagagggattgcagtggtgaaggaaggtctccttgaggagtggccaggagccagccatatgaacatctcggggaggttccatacagaaggaccgtcaagtgcaagatcgctggggagggaaggagcttggcgtagttgagggacagagggcagggcagactagtgggaacagagagtgaggggtaagtagaatcacagaccatctcaaaggtaccccccacccccactaggaaggagttgggtgcacatggatgcatttctaatctttgtgatttccttagacctgctgtcttccacgggtttctcagtggtccatttgattccaagttggagtgacagtccagaagcctctataaggcagaatatatcagaaattgtacaaggtagaaatgcatcggtatattttcagtgattattttgggtgacgggattcttatcactttggctgttttctttcttttgctgccttacctgttttcctcattgagatcttttattttcacaatcagaaaataactgtgaacattttatgttagaaaattggttttgagtagtaagtaggttccctctgccttgattaagagagtggagccctggggcatggcacgcagggtccatggcgtcgctttgaatgaggccagttcctggagctttagtttgcaaactcatacaatctggaaggctctggtgagggggaggggtgtgccaagcctcctccccaagaccctatgggtgagtttaaaatctactgacccaaaggattcaggcaaaacatttgccctgctattgaatgaaccagtgctttttgttttgaagtctccaagatccaaatatcaagtccaagttctcacaagcattcccctgctttttgtttaatttgtgtggacctgacgtgtagcagaatgggtcagaatactggaattaagccacaggcggcttgggagcccaagagctagaagggcacagtcctggcttgccctggcccctggctggtcttcatcagcttcagtgatgaggcaggacccaggcagtttgtcttcagtaaaatctgtctctcagggcctgtccctgctcacaaagtcctctcttgtctcagaagaaaaggtagttgataaactttttcatgctgaggtgttaggcacaaaaaatgtgcccctttttgaatcacttttgtttttaaaaaggaggccagtgctcaacaccaaagcatgaagggaattgttgagctttcctgtaatctgtccccaaacgtccttggccacctccattgtctaagggcagtacctgcagcccctcatttcccagtgacaacaggtgggtctgctctgccacagtgtgtgggcgggaccagcaccagacgctgagaagatgaccacttactactcttcttttccatttaaacagcagcagcagcagcagcagcagcagcagcagcagcaacagcaaactcatgactatcaataggttgtgtgaggaattagatcaatgctttgggttgaaaattagagaaactaaatcttgccagtctcagcagcccccaacctgagcccttggtggtctcctatcatcgctgtcttcaaaacgatcccagacttgtttatcaatttggtgacactgtcattttggcaaggacaccagacaatttccttgtctgtggctcagcttttggccagattttagaaaacacgggagaccttctgcatttatgggttcatgttttacattttaaaatcttcgtggctccctcagccaacccataatctctacccaaggaatggctctggattttacaggctcttatgagatgctgagaccctggtggtacaagggaggtacagaggacggaatgtgttgtcaacatgccaggatttcaacccttagggtttctctgatgccaatacccaggaattagtatgaaatgtttgtttgaacctgtgtctgaactgtatgacctggaatctatagtctttgctttaaaaaaacttcaattgtatccccaagatttcaccagcaccaagaaaacatcccttgcatttcaggagcagggactggccatggtgcagcctgaggttgtggatgttgatctttggtgcccgagagaaggctgtctgggatgaagccttctgactgtggtcaggtccctgccagtgctgggggccacatgagtgtgcagtcatccacacacaagtggcccccaacactggcagggacccggagtcatctggcccatccctccttcctatcccatcgagccacagacccctctgcaatatgcctaccacatgttcatcctaccactgatggggaacttattaccttcaagagagcctcttttgtttttgaagagctaatagtgagatccattcatgtgttcttcaactctattgagcctgtcctatgtactgggcactgttctagaaatggggtgcacagagatgaacaagaaagagcaggtccctgccattgtgcagctcacaaggagttggaggaaacaggcaatacacaatacatgcatcactatgggtagtggaacatgctctgcaggaaacaaatagggtgatccaatggaaagtcatcactggaggaatgagctgctcagggaaggcctcttccttccatagtgatgtggtctgagatttagaagacagggaaggaccagttataggaagaaccatgggaagaaaattctaggaggtaaagggaagaaccaaggccctgagttagctgaagaaaggagggtggggaatgcgggagagagggatgggagcaggatcgctggtgcctcacaggctgtggtactgagaaggacagttgggacatcattgaagggttttaagcagaagagtgtcatgatttgattcatgttttgtaagctcattctggctgttgagaatgaattctggggagaggcaagagtggaaactggggaccagtgaggagtttgtggtcatagtccagactggacatgatgatgacactgagatgacaatgatgacaatgacaatgatgttaagaatacaaacagctcacgtaagtgccaggcattctttgaaaagcaatgcatttaatcctcacaagaactctaggaggtagctggtggcttagctagggaggggaagtagagaagaaaacaggtctcatgacagggtttgctgatgggttagatgtagggagttagggaagaatgattctagatgactctacgttttgggcttgagcaactggtgtgtaactgaatcttggactgagatggggagactggaggaggaacagaagatttgcgggaaggtgtagaaatcaggatttatattttgaccatcagagaggtcagcaaatcacttcaatttagaagtctttggcttaggggagaggtctgggctggaaattcaaagtcaagagtcattcctctataccgaagggtattcaatgttgtggtgctgaatacagttacttggggaggagttgagagcagaaggcagaaaaggggaacagggttcagagctaagtcttgggcatgccaggggttaacgagggtacaggaaggagaggagactggggatgaacagccagtgatgagggaggaatgccaggagatattgtcacttaagaaattacctcggctgggcgcggtggctcacgcctataatcccagcactttgggaggctgaggcgggcggattacaaggtcaggagattgagaccatcctggctaacacggtgaaaccctgtctctactaaaaatacaaaacaaaattagccgggcgtggtggccggtgcctgtagtcccagctactcgggaggctgaggcaggagaatggcgtgaacccgggaggcggagcttgcagtgagccgagatcgcaccactgcacgccagcctgagcgacagagtgagactccgtctcaaaaaaagaaattaccttgttaaacccaacactgcccctcttttgtccattcacttctagttgccttcattcatgcctgatgtgctggacttgggttttatcaagttgcttggcacgtccttaaagaatttaaatctccacagtgcctcctggacaatgactgcagggtgacccccgtctctcctctacacgatgactcttcaaacagttgacgattgcagtttttctttccttccttctttcagtggcttctctggtgctggtcccagctgcataagcagggcctcttcttgcccttctgaagtttggtcagtggtttggcttggcaggctgatgagcagagaataagggaagccgctctctctttgccacaccattctccttccaccctctctagtttttgtggattctaagtctgaagaatggtggtagaataatttaattcattagattgcaagcatatcattgacttctctgcacccccagtgtgttgtagtggaaaaactagtagtctgggcatcagggaatccttgtttttctgcaccgggtctgcctgtaacaaattaggtaacctggggcaggtaccctggtttcctaaaagcagagcaggcattgaggtaggacctgaagttgaggtaggacctgcacattgcatgggtcccggagcctctgttcatgttcaggatgtaattgtggcatcgagggatcctaaaaggaggtggcctctgagctgggccttggcaatggggtagaattgcagtaggcagagggagcagagatgggttttgtgcttgtaaacgggcattggtttactgtcactggtgggggtagcagctcttttgttctagctcttcatttccataatgcgtgttcttttttcatactttaggggaaagaaggaggagaactctattatttctatggggagaattcctcctaaacctgaagatcttaaaactaagcgaattattccctgttcattctccactgatgcagttcatgactgcaattgcaactgcctttcccgtcattttctatggccaaactcagtgtttttaagtgagctcttcttttaaaaaacaaaaacaaaaacaagtctcctgataaatccgtttgaaagacactaagttttgaaagttaagcaggctttgatcattcatggtacattgtgaattaccaaggagggagattgatatccttcatcgtacaatgcactcccctcctttttcttttgtatctggtggagtaagtcttccaagagcaattcttagagaaacaaagcctactctgtttccctgtttctagagttttccaacaagggtataaaaaagcctcagacagcttactattatccagtaacctcaggtacctcagtggctgcgtgttattccctttagaagtccaaaaactcactagcagagcaagaatatggatgtcaaagtgcagaactagaccctgacaaactagctctgtgcctgccacaaagcctcttaattaggaatgcagttcattgaataactgtatcaaagttagctggaataccttgacatgaagattccttccacttactgagcagtttgtgcccactagtggccagacacaggctttgctctagctaaaatacccccaggattacctgttgagagagccgcccacgtcaccttcatcgcctttgtgagctccatgctggcacatagttgtctccatctgttttgctttccgcatgaatcataggcaaagttagcctgaccagcaagcccatttcaaagccaccagctgggggagaagttgaagcccagggggcaagacccacgctgggctttgggcatgtttgagctggtgggcgaagcatatgggcaaaggccacattgtttaggatggaggcctttcagagactcagctatttctggaatgacattcatactgagaaataaggaaaatggcgatctgtgtgatggttgtgggttgggaggtttgggcgtgggagtcctggtcttggggtcatgtgttttgaaaacagtctagcactatgcaaatgggaggtgttaataactctttgcctctgtgatttaccctctcatggctttttctctcttggcctctccaaggtctcttctgactcttgcaactgtccttcctttcactttcaacaaaacctgttctcttgagtcagaacagttttatgaattgcccagagtgggacttgatatggggcagggttggttccatgctggtaatgaaagatgcacataaactgttacattgaaaagtgcttcatactttctgagcccttaactcactaggttgtaggccctgggctaagaatatagctgagggggctgatgtatttccttcattgctcagctgctcctacagcaggaatctgaccttgaaatgagctttgatctttgtgcaactcgagcttcccactatctgctgggggagctaggtctgggtgctgccacggcccatgtcagaaagctgtcagcagctcttataccggacactctcagaacaggaggcctgcaaagagctttagctttagttttgttgttgttgttgtttttgagacagtctcgctctgtcgcccaggctggagtgcagtggcgccatctcggctcactgcaagctccacctcccgggttcacaccattctcctgcctcagcctcccaagtagttgggactacaggtgcccgccaccacgcccagctaattttttgtatttttagtagagacgaggtttcaccgtgttagccaggatggtctcaatctcctgacctcgtgatccacccgccttggcctcccaaagtgctgggattacaggtgtgagccacggcgcccggccttttttttttttttttttttgagacgagtcttgctctgtttccaggctggagtgcagtggtgtgatctcggctcactgcagtctccgccttccgggttcaagtgattctcctgctccagcctcccaaatagctgggattacaggcacatgccaccacacccagctaatttttgtatttttagtagagacggggtttcaccatgttggccagtatgatctcgatctcctgaccttgtgatccacccgctttggcctcccaaagtgctgggattacaggcatgagccaccacgcccggccagagctttagtttttaattccagtgctcagcaccaaggttggatattggcttaaaacttccactggaaactccacaaatgtttagcaggcctccactttgcaccaggaactgagtgtggcctggaggacagcaggtactcaacataagttctactatttattgcatacttgcaaattgggtggggcgtggggaagagtatcgccacactggggcttgtgttaatctatagtttagccacttgggatgttggtgtcacactaggtttgatctaaatagaacaggtttgtaattgacagcattttcacttgcattatatttctctgaactcgaatcattattttctgtacagctgacttgttttgctgtagcagagtttggcagataatagcttgcatgtcgaatccaacctgcttttgtaaataagattttattggataaatggctattgaaggaatgggtcacacccactcatttacatcttgtccatggctatggctgattttgtgatacaaaggcagaattgagtagttgttaagaagaccgtatgacctgcaaagcctaaagtatttgctctctgattctttatagatagtttgctatctgtgcagatatttgcactctgactctgtagcacccttatgctggagaggagatatgaattgataccaaagttgtatcaaaacacttttggagttctggccaatgtgctaataacctggcttgtgtgaacattgtggctctcattttcttttttcttttttttttttttgagacgagtcttgctctgtcgcccaggctggagtgcagtggcgcagtggcgcgatctcggctcactgcaagctccgcctccagggttcacgccattctcctgcctcagcctccagagtagctgggactacaggcgcccgccaccacgcccggctaatttttttttttttgtatttttagtagagacgggttttcactgtgttagccagcatggtctcgatctcctgacctcgtgatctgccctcctgggcctcccaagtgctgggattacaggcgtgacccactgcgcccggcctgtggctcccattttcatactgcttggtgtgacccagatggaaatgctccagaacctggcccctcaataacagcctgtaaatgcttgtttaccctgttttctcacatcagccttttaggtggggttatttgcactatcctttaacagcgcttcaataacaactcttttgtttgatcattatgacaacccaataaaatatattagtgcctcaagtacgtaaagcagaattcaaggccaaaaaaatgtatgtggcaagttaggtgggcggtcagaagaacttggcaacagagcccagccctgcctgggctgtcctaaccagagcacataaatgctggagagagtcaggctttgcacgtgctcacacgggacccttaccttggacaggatcaaagccctgtcatttctggagtgtgtgatatctgctgtctcttactgcgctggttgttacctgtctattccagttctgatgaatggctctgattggggagcagcatcatctgagcttagaaatgtcctcagggccctgtggggttccctttgagcaacaacgagagctcttgaatcttgcaccagccttttggagctggaatggagtttgctttctcctgggctgggctctgttttttttcctctcgctgtccttgtgtagcttttgatcaatggcactggaggaaaggaaaatcccttgttgttttcctgggcatgtggaagcccagtcctgcccagaattccactagccctttgagttttggaatcctgactcttagtaagtcaatagagtgctgcatctgtttttacctttgtaatcttttaaattggttttaattatttaagtaatacaagtattataatacatgaaaatatcctcaactgaaaggcttcttgaccaaactcttcttcgttgcaacagtagttcctgggggaacccactgacatcaatttgacacaactttggctctttctctacgaatatttgcatgcctgtggatgtctatacgcaattacatagttttttggtgtttgttttcataatgatgacatgttgtgtgtgcaccttactcttttcattgtcttggagacctttcaaagactcttcattttctaactcatgatttttttaactgctgcaaaatatttcattgtgaggatataccataatttattttccctcatagaaatgctacaatcaatgtccttatttattttcctctgagtatatgttcactgtttttccaggatatagtagataagcacttgaacacatatagtgtcattacgctagaggtgttacaatttttaaactacttttaatggcaaaaattacaattacttttgtatcaacctaatatattctgccacaaaatggctggtcacaaaaggattataataataatattattattattcctgtgaatggtgtctgcaggtagctatcacttatttgttctgctgatattatccattttttttgaattttgcctattggctggatgaaaattggtgtcaccctcctcatgggtttctcttgcatttccttggttgctagtgaggttgggcaccttttacgatgtttattggctgttcatatttctcctttgctaatcacatggcttttcaattttatacttagctgttttctctttgttctgtctgtaatttaattttgttaatgatgcgaactagagatttaattttatgttttaccaaatgaatagccaacactatgtattgtctgttgtatttttccccactggtttatatgatgttgtgtattatctaccaaatttacatgtatgcttccaaagtcttattccatcccattcttttatttttctttcatgattaacaccatatttttgaattgctaaaactttataatataaatataagctttgtatgtctataaataaaatacattttattaattataattatatgttatataattataatataagcacttgaacatatatacttctataattatatattatataattatatatcatacttctatgatatgttctataattatatattgtatatatcatagttctatgatatgttctataattatatattataaagttacaattaattgtatatttaatttataccatatactgtaataagcaaaatatagaaatatgttttaaatctggtaggtggtatcttgactcattggttttatatgtttttctgattttctttttgttcatttgttcgttttggtttttagttgctgttgtgtttacttcaaattttttcttatctgtcattgctcattgttttttagatgaatttttaattgatttttttccagttccagttgcaatatggattaggacagcattgaatttgtagattattttggatgaaattggcatctttataactttgagtgtttctatccaggaacttagtatgtttctttagtacttcttttatgtacttgaataaaatttgtctaacttgttgatgtatccccaaagaaccagacatttttattaaatgtattttaatatttttttctgtctcattagtctgtgcttttatccatattaagtcaattaatttttggacttatttcattgttttttttctggcttcttgagttgaaagtgtagttcactctttttaaggatttttctagcaaatgcttagaagtgtatacattgtcctctgagaactgctttggttacaacccacaggtgtgccatgtggctctctatataattccttgctgaagaagtttttacttttcatcttgttttttttaatccgaggaattatctggaacactgtttttaaatttccaaatttattttggctagtttgtttttaatgtctaatttctgtttgcctttaggtatatgttgagcctacatcatttctgcttctatatttattgagatattctttgttgcccttatagtcagtttgaaaagctgtcccatgtgtgtttgaaaataactttgctatatagacacaagttttctatacatctattaggacagatttgttaatcctcttatgtaatctatattctttcttctttttggtctacctgacatctattttgaggaaggaagctaaagtcttctactgttattgtgattttaacaatttcttctcatattttgattactttttgattttaactttttcaggccatgttattatatgcataatgatttattttcttcagtcatagatcatgtaaaccagaagtaaagatcaaataaaccaaatctttcctctatgaaacaaccaaacaactctctggccacttttatcctttcaacataagttctattttttattattaatttatcttctttcttttttgttaacatttgcctgaagcttcttttcagaatcttttttgtttttgactgttgcttgttttaggtgtatctattatattagaatatagctacaatgtctctcttttttttttttttttttttttttgagacagagtctctctctgtgcccaggctggagtgcagtggtgtgatcttggctcactacaacctccacctcctgagttcaagcgattctctgcctcaacctcccaagtagctgggactataggtgtccaccagcacacctggccaatttttttgtatttttcgtagagatggggttttggcatgttggccaggctggtcttgaactcctggcctcaagtgatctacctgcctcagcctcccaaaatgtcttaatcaaagataaaattccatatcttatgagtgccttgaacccattcacatataatgtggttgatgatagacttactatcttaatgcatgtgttttatttattgtgcttatggttgaaaaccatcttcttcatctctggatcatcagagtcaaccagagggcttggctcaaagcagtaggtattcaacaaatgctcattgaataaaaatgtccttgatcctctaattctgatttgattcgagaaataacttatggcaaagagctcaattgtaatggggttgggactaaaattcaagttaatgttgaaagatgtttcaagaagtatttaggttatattattaaatattagacactttctgtttatatagatttaacatataaagattttaagttttctgtgtatgtgaggtctcgtagtagtttctgctgaaaatgacaggggcgcggggttaagggtgaagacagtatctcaggattggagaaggaaatctaagatattgtctccaccagccatactcctcatgaacatgcacatggaaggacatttcccagccaaagtgaatccctttatttgttttagtttcagatttgagtctcagatttctttgtaattccagctgcatctaccaaagtgctagataatttttttattttaagcaaacaatattatgagaacattatctttattgcaaagtgctcctccagaagaacctctatgctggataaagacaaacatttgattaaggttatgtaagagtgaaatcaggatggctcacaacccattagccgtcattttcttactttaattgacaaagaaattgaaaaaatgaaagaagcatatgttgtgcttgaatgtgaagagtgctagactagaatcaaaggcctcttagatttggctgtgtcatttgggctcatgaaaacacctctggaaatctctttcagtgcaaaggagctggactagttgatctctcaggtttcttccaactctaaaatatctccagtctgtgccttggaaacatcttaggtgaaaatctaggaacagttaacctaatttgcacccttaaaattctgccatgagctgcttacaactcaaaacaagtttatcttactcagttactaattataaaccatccagatttcagagctgtgagtactgggtgaagcattgaaggtatgcttttgaagccattacatatggcagttactgagctgaaaggattaaatgctgcagcttccccagttgcccttcctccatgagagcagtgcctgcccccagcattctgtggcacttggaagacaagacagaggccaaatgcagatttttaccctgggcttccctctacagtgtggaactcaggttgtttcttctttcctccctgaaatgacatgagtttgcagcggatggtgaactgaagaaaccataggaggctctgtcttcttgcctgaatttcagttggaagcttggagatttggggttcaacagagataaggaagtgtaagccttcatcccgtctggtggttggcgatcacacaccgctctgtgctgaggctaatggccatgatcagagttgaccaaaaaaaaaaaaaaaaaaaaatacgggttgtccaagcaaattgatttccatacctatagagagcatacctttcttcatcagtattttcttccattcttccaaaaaattactttgggctctaacagccattcccgtgatctttacctctccttggggaatgcagataatttgaatagtggttttaagctatttttcttggaatacagaagttctgataagcccttcaaagacccctgagggcaagaagagggaaggtagtaggcagggctcaggccctctttaacacagacacatgtacataagtaacacatttgcaccaacactggaaggaaattcaatatattttaaaatgactttaactcctagtgatggaactatagatatttttttacagcccttccctgaatgttcacatgtgttttttatatatatgtgtgtgtcacgtatttgtatatgtgtatatacacatatatatagaaacacgtacatatttgtatgcatatttgtacatataggtatatatgtatgtaatgtgtacatattggcacatgtgtgtgtttgtatatgtatatatcagtacatatagatgtatgtatatatgtatatattttttcctccaaaataaacaataaagaatgtcttcttagattgcaaaagtgaattgtctgagttctgctaaggaaaaaggacttctgcttctgctgcctgtgaggactgtgctgtcagcagtcatggcccttcaggccctgcacctcgaggcagagccctcccccggccatggccagctctcctaaccaagtgtctctttcccccagaatggctgcagtctgtccaggccaccatgatcctgtcgatcatcttcagcattctgtctctgttcctgttcttctgccaactcttcaccctcaccaaggggggcaggttttacatcactggaatcttccaaattcttgctggtaagttgtggatggtaaagtccatgtggaagcggggtgcatccaagtctgcggaatgattagtttagtagaaggatgtggcctcagaatgactgatgttcatgagtctccccactggatgctttccataaagtgagggtgggtgcttgtatgtgtgggtgtgtacctgtatgtgtcttagaacttgggacttagaactctccccttctccctggaatgagatgcatatgaaagagaacttagaggatctggaaggaaggtccccacccaagccaggcgtatcaacaggaatgaaactgcaatctggacacataatcagaggtgaatactgaggctatctgtagagcaaaggtcaggcttgagagctgtttctgtagattacattatgcctccagaaaatggccctgatgtgctaagaactagcaaagtagttatcaggtatgtgtcttccaccaataggtagtgatgaagccacactgacaaattctcaccttccttgcttccagttcctagattctactgggctttgattgactgttgtcatcctctggtgtcttcattttgacactcttgtgtcacatattgtcatttccaaacatggggctatgacaacacatgaaaacacatgagaggtctccttaatctcctgcctaaactgtcttcaagttccctctttaaatacgttattaatatgcatagtgtgcagagtcctagaaacttctgttacacagggtgacatcttccaactttgtctctggattctgcctagcatcttacatgcttacatcttacatcttacatcttacatcttgcattctgcctagcatcttacattagctcttacatgtctgtctgttgacttactgttgactgaaccagcagggcattggagagaagtaagagctagatgtagtggtggattctgtggtccaaattcatagatcacaaacttcatatgtaccagagtatgtctaggtactgggagatgttctcaattctgaccctctgagagggcaaaggatgtagcatctcttctctgagttggttgtcagaatgcccatggtaccatttcaccactctgtccccaggagcagtcattggaaggttgacgtaaatagggttgtatgggaagacacagcccaaggttagatgttggtgaccttgtctagaagacagagagttcccctttcctgaaaaaaggaagtaaatgattaaccacttctcattaaacactcaaatacaacatttcaatactcatggttttgagatttcaaaaccagacagtgctttgctacttacacatgtcttatgacaccaagccaagctcctggatggttgctggctctgttaaatgactaattatgcaaggagatatcatttctaggtacgttaaagtgaagagttacccttactcaattttcagttggaataaaaacaactgtaacatattctggggtttctttttttttttctcactcgttttagtttgatatcaaatcaaataatgatcatatccattgcatcagtggatatgccctcaagataatatggatttagaaccagaactttcataatgtatttctattgaaatgttagtttcataagcgatgattgggttttcatgcccatgtgtgagatgtgcctcgctcaaaccttgttatgatttggcacgttacccatctgatgtgaaaaaaattacattttatttgtacaggctcgttattttactgatgaataatttgagcccaccagaggataaatgaatgaccaaggtcacccagctcatgacagggacggttgagtgttacactgaatatagtgaggtacttcttatattttaaagacagaatgcaccaaaaaatttaaagaacacaaaatccaaggcagaagctctgccttttatattatcttttattggaactgatttacaatggaaggtaaatgcaaatttgcaccatgtattattctgaagttccaaacatctgtgatgaatacaagcctgtactataagacccagtcacattgaaaatatggagctgagaagaggtaagctgctgttgaatgggctccttgggatagccagtaccttcatcttcattcatcctgctgagctgtttcggctttaagttctttaacaatgtctttttagcaacatcattacatcattttaggccaaaactcaaagtccagagataagaacccttaagtcactcatgtaactgcactgtgtgttaaaagtatttcagttcagccaaacactcttctcctaggtattgcgatttaagtatatttactaatccactcttgcttcactattttcattctcctccaaagtcaatacaagatgtttagaactgtgctggaagtgcagaattccgaatgtaaaagcgcatgactttgtcctctttatcccctttacatctagctgcttacgtctcatgaaactgaattttcagttatctgttggtccacatttgaataagaaattatcttgaatttgaaatgctgagctgtaatagcagttgtaatttgtaagtcctgagagtgtcctgtcctccgttgttaatcccagtcaagatcatctgagagttggtctccagggaacctcagatctctaggatgttgcactggaaatggctgcaggatctttccactaattctgagaactgaaagagttaggaactctatttggagagttcctggttcccttatcgtgtgacagttctaagtcaattttgtcatgtggttttctgactcacagactagtaagaagttagtaattagagagctaagtagattagggttgttggagatgagaaacccacgttttgggaaaacctggcaagtgacaacttaacatcaaggaagtagtcagaaaagctaaaactgacaaacagaaggtagaagaaagtagctccacactcatgggatgtgaaatctacaagcgtgcatgcccggcaaatgcctctccaatgcactggagcgttttaagtggaaaccactagaatctctgtgtagtctccggaagtggctgtgagggctgcattatctctgcacagcttcctcttggtgggcccagctgtgatctttatggatggcacacatcagctttcaggaaaagcacatgaaaggtgctagggctcttggagctgactgtaggtttgggagttgtctgtctccttgctctagattacagctctgtgtgttgtgtggggtctccatggtttgccaaattatctcttcctcacttagccacaaggctgacagttaggaactatctcttcttgattgcattaggttggctgcttcctgaatgcatatcaaaaggctccttcctttagttcagtgctttcaacctgagctgtgcatcagaatcacctgaggtcctttaaaaaaaaaaaaaagacagtgggcggggcgcagtggctcacgcctgtaatcccagcactttgggaggctgaggtgggcagatcacttgaggtcaggagttcaagaccagcccggccaacatggtgaaaccctgtctctactaaaaataaaaataaaaaaatagccaggcgtggtggtgcgtgcctgtagtcccagctacttgggaaactgaggcagagaagaatcacttgaacctaggaggtggaggttgcagtgagccaagatcatgccactgcactccagcctgggggtgacagagtaagactgtctcaaaaaaaaagaaaaaagaaaagaaaaaagacagtattcaggtctcatccctggagactctcatttaatagttgtgggatggatccactgcctaggtgactctgatgtgcatttagggttgggaaccactgacatagccattaaactgtccctaatcccactgtaaggttttctaggatattttcccagaaataactaaaccaccttcttagagaaggaacatcctgatcctgcgtctggactttggagtcattcttattttcagaacctatagccatctattccttgacaagatctgttgggttgggttgcactagactggaaaacatcaagaaattaatctagacacagacctaaaaggaagatttgcacgttttgatttattttactgcttacacccagcatcaagctccatgtggggcacatagaggagcctgaataaaactattattggttggatgattagataattgtgtttcctcggcagaatcaaactcaagtcaaatgtgtggttaccgggattaagaacagaaagaatagaggggactcctgagtgagtttcactttctctctctttttgttattgttgttcatttgttttgttaatagaaagatcaatatagctatagagcatttaaaataaaaggatttgggccaggtgtggtggcgaatgcctgtaatcccaacactttgaaagactgaggtgagaggattgcttaaagccaggagttcaagaccagcctgggcaacaaagcgagatgccatctctacaaaaaatgatttaaaaattagtggggtgccttggagcacgcctgtggtcccagctattcaggaggctgaggcaggaggattgcttgaggctgagaggtcaagactacagtgaactatgatcaggcccctgcacttgctccagcctggtgacagagtgagaccctgcctctctaggaaaaaaaaaaaaagaatttggtggggggggattaataaaagttcagtgccatcctgttcagagtgattcaaaggtggcttaagtcaaataccacatttagaaatttttgttagggacggatgattatggatgtctcactggccatgcccaaatcagagtcaatgctatgggtggctttctaggcagcaatggtcatttggatactgaaaatgtaaaaggagtgggcttcaatcacagaaacacagagaagtctcttgctttcagaggaacaggcctcacagccccttcctgccctcccttgttgccctgaggatgaagtgggagggagaaaaaggcacccactcatcaacccaacatcatagctgcaccttccagtgaccaccctggtggtctcactgacatccctttccagccaacttctctctgacttctgccccaggctctcaaatgaaagtgcttttgcgaggttaccaaagtacactttgaagtctttaatttgttggatcactctgctcctttcaatactgttagctacttactctttgaagctctattcccctggcttctgagacatcgctgtgttcccacttgcctgagtgaacacaccaggcggtcatgctggcctctcctctctccctcaccccacagccagccttctactgaatcctgcatttgggtagcatcctccgtaggcattacgcccatttctttgtcttgactcactaaccccagtgcagctatgcaaaggcctcctcatgcaccttccagctacctgccttgtccctgcccctgaatccattttctgcaccatggccagagtgatcattctaaaacgtgcgtctgatcatgtttctcctctgctgaagtttcctcagaggcttctcatcacagcttccttaacatgtcatgtaaggccctctctttcctgacccttagtgagctaatcagcctattatatgagagtccgtgtggcttctccagttctccagtttggactcagcgcccgtctatgctcttggggcatctggtgcatttccttccctctctcgaaattccatcgaactatattgaaattatatgcaaatgtctgtcttctagacacacagtccttaaggtaggagccatgtctcacttatcttggtacatctagagcagcagctagaacagggcccgcatgcaataggcactcattaaatgttcactgaaccaaagggaatggagatgataaggatgtactgggaattccctcagctacttcctttgaccttggccccttgggtgcttccttccagaggctctgggctctaatcactctcatggggttgcagtcactgttaaaggagcttaagactttctcttcaaaagggctttaggcagaacttgcaggaagttgttgcagacctacccatcctgagacagggagaaactcttgtaagttgaatgctcagcacatttgtattgtctggacagggtcagtgtccttctgcttaaagatgacctatgctcccagactcaggcccctaccagggagtcccggtcattgccaaagagcagaacatctgcctgtgcctcagggcctcacttacccttgccacagggacctggtgatacatctccacctactggttgctgagaaagtgagtcacagtccacttactaggggtatttggcttttggagatgactactggatgacattaactgtcttgggttgcagacagagggaacccagccaaagaatcatccttttctctatttcagggtacatctattgctttacatgcagacaatcttgtaataatatattccctaaaacatcagtctcatgacaacaatcatataaagtgtgtatcctctctttggctttgtagatatctaagtttactgcttatcacggttaagcttagagtcattcacttctgagattctactaagatgaaagtcatacacattaagctgtgtagttagtcgctgcacttctctatactgcctctttctatccctcttgttcaaggatggaatctggtatctcctcttagtcagtgaaatcggggagtagctggtccactcagctcctgaggcatttctcatgccagatctggttagacagcccatttgggagccctgcctgcatgatgataagtgttgtcctgccctgctagcactctgttaacacctttctctctgccaaggtcatgtttccttttttatagccctgccttcattagataagtcagacagagcccaagagacaacttcagtatttcttaaagacaagagttagcactttggagatgcaagccgtggaagagtggggcaagataattaaggatcctggacctcaaggcaaataaagtgtgtccccagcagatcaaaactgctgttttctgcaatcaacaattaacccgcaatgatttcgctcctgacatggccatctttgctgtcttctgaacttcctgtaggtggcaggtcctggatgctgtcccattttggttccaagactattgtgtggctctcttgacaggggccagtcaagtggcagttttctcctctgagttgcaggaggacaggcttaacagggtggttcatgtggcgtattcccacttctgcactgtcttcaaacaaagttgcagtgtccagtaaaacagcagcccaaatagcagtgaggttagatgtaggtggccgggcggtgggggggcgcgggtgcattgggaactctggaactgcatgaatcccacacggcatactggatttataatagagtcactcagagcttctcaaagaccctgttttcagggaggaaacagaccaggctttgtgcagctccaggctggggtgctgacatcactggacccctccttgtggggggacgctgtctgtcacgtgagctggggccatcagtttgagcgtggctgctccacagggcccaagatggaggcttttcttctctttccaacaccgaagggctgcattggtgggccagggagggtggcctgacccacctgcatatccagtgccctttagccttctttgggcttcaaatgcaaccttggggcacccagggaaatggagcttgcctttgatcatcttccccctctgcagcgtggcttcccagtcatactgtcggctgcatccttattcctcactttctttttccctctccacacatttctttgtctgtttggcagtgcccataggcattgcttgcttcacctggtatgtggcaactctgttagggggaccataggcccctgtggtctgcatggagcttaatccttttaccatggcgtgactccaataatggtaaaatgtcacttcacttccattggctttaggtaatgccaccactcacttgtagagtggcatatagatttccaggggtttccatacccaaccacccttggaaagagacaggtaggtttttcttgcagcctgaatgcctgctggccatgtagtgtggcctgggaattggtgacagtgaaagaaagagaaatagggcagaaaatgtaaagaaaaccctcaggtattaaggcctaggtggccaagattggaaatagagagcaagttgttttccttgttcccatatttttgtgctacctcctttcaattctggacctggaagcagatttccttccagaggtagaaatgttcttcctacccagcaattgtcagcatccggggtggcggagagggggccgctctgccatggactctccgtcacccagcttgtccctctccttccccaggtctgtgcgtgatgagtgctgcggccatctacacggtgaggcacccggagtggcatctcaactcggattactcctacggtttcgcctacatcctggcctgggtggccttccccctggcccttctcagcggtgtcatctatgtgatcttgcggaaacgcgaatgaggcgcccagacggtctgtctgaggctctgagcgtacatagggaagggaggaagggaaaacagaaagcagacaaagaaaaaagagctagcccaaaatcccaaactcaaaccaaaccaaacagaaagcagtggaggtgggggttgctgttgattgaagatgtatataatatctccggtttataaaacctatttataacactttttacatatatgtacatagtattgtttgctttttatgttgaccatcagcctcgtgttgagccttaaagaagtagctaaggaactttacatcctaacagtataatccagctcagtatttttgttttgttttttgtttgtttgttttgttttacccagaaataagataactccatctcgccccttccctttcatctgaaagaagatacctccctcccagtccacctcatttagaaaaccaaagtgtgggtagaaaccccaaatgtccaaaagcccttttctggtgggtgacccagtgcatccaacagaaacagccgctgcccgaacctctgtgtgaagctttacgcgcacacggacaaaatgcccaaactggagcccttgcaaaaacacggcttgtggcattggcatacttgcccttacaggtggagtatcttcgtcacacatctaaatgagaaatcagtgacaacaagtctttgaaatggtgctatggatttaccattccttattatcactaatcatctaaacaactcactggaaatccaattaacaattttacaacataagatagaatggagacctgaataattctgtgtaatataaatggtttataactgcttttgtacctagctaggctgctattattactataatgagtaaatcataaagccttcatcactcccacatttttcttacggtcggagcatcagaacaagcgtctagactccttgggaccgtgagttcctagagcttggctgggtctaggctgttctgtgcctccaaggactgtctggcaatgacttgtattggccaccaactgtagatgtatatatggtgcccttctgatgctaagactccagaccttttgtttttgctttgcattttctgattttataccaactgtgtggactaagatgcattaaaataaacatcagagtaactcactggtctctcttgagtttttgtgggaacttgggtgtgggtacaaggtgcctgttggagcaggatgaagagcttcagtggaaagcaaagttgagctggagatttgggttacaagatggtgctaaggcaccaaaatcatagctgttttacaagctacagggagcacatgatgccttcatgatgtctgtgcaaaggtttgctaattggagacagttgggaattgcagctgaaatggaggctgtaaatggactggaaggcacttgagtattcatttagttcaaccctctctggtgctctgttgtttgatgacccacatggaaaacatggaggcatgtcatgagctgccctgatatactgggaatgttggcagaagcatctcagatccctcaccctgaggtatgatatggtgaaaggtctgaatgatggtgacttgaggccacacttgcagataaaacattggttggcaccaactaagctcctaatgccatcctgaaggagagaaaaggccaccattgtcacccagctcagggtttctgagttgtgtctcatgcgtccatatttttacccgtcgaccttttgttgtgtgtctgcaaaataacaagcaaatgatgtggttgatagtccttaatatttattgtgcaactattttgaattgggtaccaaagataaagaagtaatgacatatatcttaacatcgaaaggtcacattttagtgagaggtacaagtaaacaagtgactatattataataaggttaagagcatagaaatgagagcctgggtttgagcctgtcctttgctgcttaccagccataggggcctgaaaaggttacgtaaacactaagattcagttttctcatctataaaatggggatgccaataacaagggtatagggctgaggggatttcaaggaagttatatggataaagtgttcagcatagtgactagtacctagaaagactctatagattagagtggttatcacatatgttacaacagaggtatatttgaaagagcatgtaggagagacattgactgttatgcaggattctcagtatcagtctgcacactggaatctcccatgcaggaattcccattagagatttggattccctgtttccatgatgggacccacccatcatggtttaaagaacacttctggtgattacagcatgcaactggggatgacacctctgagctagtgcaggaggtctcatacttcaacatgctagtgaatcacctgggaatctgatagcatgcagattctgaaactttaggcccaggtggggattgagattctgcatttccaattagtgcctgggtgaggtggatgctgcttgtccaccgaccacactttgagtagcaagggcctagcataaagccaccttcaggtaccttgtgctcttctgtccttgggtgtctgtgacggaaggacttctcttttctgaggttttcagtagtgactgctactctgcttttgactcagatagttttaaggtggcacaggtggccatgagatgcatgtgagattaagaaaactaggaattttatttcacgagctggtactttgaaaacatacacttttatttcataaacttttctaacatttcattaaaaattaatagggataagaataaagaagaaaagcaaaaacggcccctaaatctccctacccaggtaacactcttggcatttaaaaaaaaaccatatatctaggattataacatcctatcttgtatctagagggaaaaatacaatctgaaagcctctttcccacctacccatagtcttttgccaaaggtaaccgtaagacatagtttcttatgacttcttccaggaaagaaaattgcccacatatgtacatccatctatgtattttttaaacgtacacaaaagtgatcatactactcacttctgcaccttttcatttaatgataaaaatttgagatcattctataccattctataccagcatatacctcatgctttttagtgaacactattttattctttcaaaattctgcatagtattttattgtattgttgtacaaacctttatttaccagccctccattgatagatattttggttgtgtctactttttattattaatcaaaatatttctgtggacatccttgtacatgaatattggtgacttttaaaaagtatatccaaatcttaaatttctggtaaggatgttgccaaaacagagggtgtgtatattttgaagaatctaataggtattttcagcttagtctccaggaaaattacaccaactcagttgacagtggagccttacattctacatggaactcatggagtccccccaaacagagaagggttagaataaaacacttgagtaaaaacaacttatctgctatcagttccttgggtcatgattgttattgatctctcatctatggggacagcttcgcttccttgggaacttgtctgccttgaggatctgtaatgatagaagggacattatactgaccctacacaaacaacaacaaaaaattacaaagaaatgctatgaacaattgtatacaacaaattaggcaccttagatgaaatggacaaattccccagacacaattactgaaactgactcaatatgaaatagataataagaataggcctataatgagtgaagagattgatctattaatactactactaataaattattcacaaacaaaaaagcccaggcccaaatggcttcactactgagttctaccaaatatttaaagaagaattaataccaattcttaacaaactcct

SEQ ID NO: 3 - DNA, 1818 bp, Homo sapiens
tgttcccgttaaaggggaacgccaggagcctcccactgcccccttgcttcgcgcgcgcgcagccccgcagcgcagctttggcggcgccagcagcggagccaacgcacccgagtttgtgtttgaggccaccctgaggatcgggacagctgttcctttgggctgcagaaactccgctgagcagaacttgccgccagaatgctcctcctgttgctgagtatcatcgtcctccacgtcgcggtgctggtgctgctgttcgtctccacgatcgtcagccaatggatcgtgggcaatggacacgcaactgatctctggcagaactgtagcacctcttcctcaggaaatgtccaccactgtttctcatcatcaccaaacgaatggctgcagtctgtccaggccaccatgatcctgtcgatcatcttcagcattctgtctctgttcctgttcttctgccaactcttcaccctcaccaaggggggcaggttttacatcactggaatcttccaaattcttgctggtctgtgcgtgatgagtgctgcggccatctacacggtgaggcacccggagtggcatctcaactcggattactcctacggtttcgcctacatcctggcctgggtggccttccccctggcccttctcagcggtgtcatctatgtgatcttgcggaaacgcgaatgaggcgcccagacggtctgtctgaggctctgagcgtacatagggaagggaggaagggaaaacagaaagcagacaaagaaaaaagagctagcccaaaatcccaaactcaaaccaaaccaaacagaaagcagtggaggtgggggttgctgttgattgaagatgtatataatatctccggtttataaaacctatttataacactttttacatatatgtacatagtattgtttgctttttatgttgaccatcagcctcgtgttgagccttaaagaagtagctaaggaactttacatcctaacagtataatccagctcagtatttttgttttgttttttgtttgtttgttttgttttacccagaaataagataactccatctcgccccttccctttcatctgaaagaagatacctccctcccagtccacctcatttagaaaaccaaagtgtgggtagaaaccccaaatgtccaaaagcccttttctggtgggtgacccagtgcatccaacagaaacagccgctgcccgaacctctgtgtgaagctttacgcgcacacggacaaaatgcccaaactggagcccttgcaaaaacacggcttgtggcattggcatacttgcccttacaggtggagtatcttcgtcacacatctaaatgagaaatcagtgacaacaagtctttgaaatggtgctatggatttaccattccttattatcactaatcatctaaacaactcactggaaatccaattaacaattttacaacataagatagaatggagacctgaataattctgtgtaatataaatggtttataactgcttttgtacctagctaggctgctattattactataatgagtaaatcataaagccttcatcactcccacatttttcttacggtcggagcatcagaacaagcgtctagactccttgggaccgtgagttcctagagcttggctgggtctaggctgttctgtgcctccaaggactgtctggcaatgacttgtattggccaccaactgtagatgtatatatggtgcccttctgatgctaagactccagaccttttgtttttgctttgcattttctgattttataccaactgtgtggactaagatgcattaaaataaacatcagagtaactcact

SEQ ID NO: 4 - DNA, 1822 bp, Homo sapiens
tgttcccgttaaaggggaacgccaggagcctcccactgcccccttgcttcgcgcgcgcgcagccccgcagcgcagctttggcggcgccagcagcggagccaacgcacccgagtttgtgtttgaggccaccctgaggatcgggacagctgttcctttgggctgtaagcagaaactccgctgagcagaacttgccgccagaatgctcctcctgttgctgagtatcatcgtcctccacgtcgcggtgctggtgctgctgttcgtctccacgatcgtcagccaatggatcgtgggcaatggacacgcaactgatctctggcagaactgtagcacctcttcctcaggaaatgtccaccactgtttctcatcatcaccaaacgaatggctgcagtctgtccaggccaccatgatcctgtcgatcatcttcagcattctgtctctgttcctgttcttctgccaactcttcaccctcaccaaggggggcaggttttacatcactggaatcttccaaattcttgctggtctgtgcgtgatgagtgctgcggccatctacacggtgaggcacccggagtggcatctcaactcggattactcctacggtttcgcctacatcctggcctgggtggccttccccctggcccttctcagcggtgtcatctatgtgatcttgcggaaacgcgaatgaggcgcccagacggtctgtctgaggctctgagcgtacatagggaagggaggaagggaaaacagaaagcagacaaagaaaaaagagctagcccaaaatcccaaactcaaaccaaaccaaacagaaagcagtggaggtgggggttgctgttgattgaagatgtatataatatctccggtttataaaacctatttataacactttttacatatatgtacatagtattgtttgctttttatgttgaccatcagcctcgtgttgagccttaaagaagtagctaaggaactttacatcctaacagtataatccagctcagtatttttgttttgttttttgtttgtttgttttgttttacccagaaataagataactccatctcgccccttccctttcatctgaaagaagatacctccctcccagtccacctcatttagaaaaccaaagtgtgggtagaaaccccaaatgtccaaaagcccttttctggtgggtgacccagtgcatccaacagaaacagccgctgcccgaacctctgtgtgaagctttacgcgcacacggacaaaatgcccaaactggagcccttgcaaaaacacggcttgtggcattggcatacttgcccttacaggtggagtatcttcgtcacacatctaaatgagaaatcagtgacaacaagtctttgaaatggtgctatggatttaccattccttattatcactaatcatctaaacaactcactggaaatccaattaacaattttacaacataagatagaatggagacctgaataattctgtgtaatataaatggtttataactgcttttgtacctagctaggctgctattattactataatgagtaaatcataaagccttcatcactcccacatttttcttacggtcggagcatcagaacaagcgtctagactccttgggaccgtgagttcctagagcttggctgggtctaggctgttctgtgcctccaaggactgtctggcaatgacttgtattggccaccaactgtagatgtatatatggtgcccttctgatgctaagactccagaccttttgtttttgctttgcattttctgattttataccaactgtgtggactaagatgcattaaaataaacatcagagtaactcact

SEQ ID NO: 5 - DNA, 1857 bp, Homo sapiens
aataaactggaaagacgcctggtctggcttcagttacagggagcaccaccagggaacatctcggggagcctggttggaagctgcaggcttagtctgtcggctgcgggtctctgactgccctgtggggagggtcttgccttaacatcccttgcatttggctgcaaagaaatctgcttggaagaaggggttacgctgtttggccggaaactccgctgagcagaacttgccgccagaatgctcctcctgttgctgagtatcatcgtcctccacgtcgcggtgctggtgctgctgttcgtctccacgatcgtcagccaatggatcgtgggcaatggacacgcaactgatctctggcagaactgtagcacctcttcctcaggaaatgtccaccactgtttctcatcatcaccaaacgaatggctgcagtctgtccaggccaccatgatcctgtcgatcatcttcagcattctgtctctgttcctgttcttctgccaactcttcaccctcaccaaggggggcaggttttacatcactggaatcttccaaattcttgctggtctgtgcgtgatgagtgctgcggccatctacacggtgaggcacccggagtggcatctcaactcggattactcctacggtttcgcctacatcctggcctgggtggccttccccctggcccttctcagcggtgtcatctatgtgatcttgcggaaacgcgaatgaggcgcccagacggtctgtctgaggctctgagcgtacatagggaagggaggaagggaaaacagaaagcagacaaagaaaaaagagctagcccaaaatcccaaactcaaaccaaaccaaacagaaagcagtggaggtgggggttgctgttgattgaagatgtatataatatctccggtttataaaacctatttataacactttttacatatatgtacatagtattgtttgctttttatgttgaccatcagcctcgtgttgagccttaaagaagtagctaaggaactttacatcctaacagtataatccagctcagtatttttgttttgttttttgtttgtttgttttgttttacccagaaataagataactccatctcgccccttccctttcatctgaaagaagatacctccctcccagtccacctcatttagaaaaccaaagtgtgggtagaaaccccaaatgtccaaaagcccttttctggtgggtgacccagtgcatccaacagaaacagccgctgcccgaacctctgtgtgaagctttacgcgcacacggacaaaatgcccaaactggagcccttgcaaaaacacggcttgtggcattggcatacttgcccttacaggtggagtatcttcgtcacacatctaaatgagaaatcagtgacaacaagtctttgaaatggtgctatggatttaccattccttattatcactaatcatctaaacaactcactggaaatccaattaacaattttacaacataagatagaatggagacctgaataattctgtgtaatataaatggtttataactgcttttgtacctagctaggctgctattattactataatgagtaaatcataaagccttcatcactcccacatttttcttacggtcggagcatcagaacaagcgtctagactccttgggaccgtgagttcctagagcttggctgggtctaggctgttctgtgcctccaaggactgtctggcaatgacttgtattggccaccaactgtagatgtatatatggtgcccttctgatgctaagactccagaccttttgtttttgctttgcattttctgattttataccaactgtgtggactaagatgcattaaaataaacatcagagtaactcact

SEQ ID NO: 6 - DNA, 1749 bp, Homo sapiens
aataaactggaaagacgcctggtctggcttcagttacagggagcaccaccagggaacatctcggggagcctggttggaagctgcaggcttagtctgtcggctgcgggtctctgactgccctgtggggagggtcttgccttaacatcccttgcatttggctgcaaagaaatctgcttggaagaaggggttacgctgtttggccggcaatggatcgtgggcaatggacacgcaactgatctctggcagaactgtagcacctcttcctcaggaaatgtccaccactgtttctcatcatcaccaaacgaatggctgcagtctgtccaggccaccatgatcctgtcgatcatcttcagcattctgtctctgttcctgttcttctgccaactcttcaccctcaccaaggggggcaggttttacatcactggaatcttccaaattcttgctggtctgtgcgtgatgagtgctgcggccatctacacggtgaggcacccggagtggcatctcaactcggattactcctacggtttcgcctacatcctggcctgggtggccttccccctggcccttctcagcggtgtcatctatgtgatcttgcggaaacgcgaatgaggcgcccagacggtctgtctgaggctctgagcgtacatagggaagggaggaagggaaaacagaaagcagacaaagaaaaaagagctagcccaaaatcccaaactcaaaccaaaccaaacagaaagcagtggaggtgggggttgctgttgattgaagatgtatataatatctccggtttataaaacctatttataacactttttacatatatgtacatagtattgtttgctttttatgttgaccatcagcctcgtgttgagccttaaagaagtagctaaggaactttacatcctaacagtataatccagctcagtatttttgttttgttttttgtttgtttgttttgttttacccagaaataagataactccatctcgccccttccctttcatctgaaagaagatacctccctcccagtccacctcatttagaaaaccaaagtgtgggtagaaaccccaaatgtccaaaagcccttttctggtgggtgacccagtgcatccaacagaaacagccgctgcccgaacctctgtgtgaagctttacgcgcacacggacaaaatgcccaaactggagcccttgcaaaaacacggcttgtggcattggcatacttgcccttacaggtggagtatcttcgtcacacatctaaatgagaaatcagtgacaacaagtctttgaaatggtgctatggatttaccattccttattatcactaatcatctaaacaactcactggaaatccaattaacaattttacaacataagatagaatggagacctgaataattctgtgtaatataaatggtttataactgcttttgtacctagctaggctgctattattactataatgagtaaatcataaagccttcatcactcccacatttttcttacggtcggagcatcagaacaagcgtctagactccttgggaccgtgagttcctagagcttggctgggtctaggctgttctgtgcctccaaggactgtctggcaatgacttgtattggccaccaactgtagatgtatatatggtgcccttctgatgctaagactccagaccttttgtttttgctttgcattttctgattttataccaactgtgtggactaagatgcattaaaataaacatcagagtaactcact

SEQ ID NO: 7 - DNA, 1649 bp, Homo sapiens
aataaactggaaagacgcctggtctggcttcagttacagggagcaccaccagggaacatctcggggagcctggttggaagctgcaggcttagtctgtcggctgcgggtctctgactgccctgtggggagggtcttgccttaacatcccttgcatttggctgcaaagaaatctgcttggaagaaggggttacgctgtttggccggaatggctgcagtctgtccaggccaccatgatcctgtcgatcatcttcagcattctgtctctgttcctgttcttctgccaactcttcaccctcaccaaggggggcaggttttacatcactggaatcttccaaattcttgctggtctgtgcgtgatgagtgctgcggccatctacacggtgaggcacccggagtggcatctcaactcggattactcctacggtttcgcctacatcctggcctgggtggccttccccctggcccttctcagcggtgtcatctatgtgatcttgcggaaacgcgaatgaggcgcccagacggtctgtctgaggctctgagcgtacatagggaagggaggaagggaaaacagaaagcagacaaagaaaaaagagctagcccaaaatcccaaactcaaaccaaaccaaacagaaagcagtggaggtgggggttgctgttgattgaagatgtatataatatctccggtttataaaacctatttataacactttttacatatatgtacatagtattgtttgctttttatgttgaccatcagcctcgtgttgagccttaaagaagtagctaaggaactttacatcctaacagtataatccagctcagtatttttgttttgttttttgtttgtttgttttgttttacccagaaataagataactccatctcgccccttccctttcatctgaaagaagatacctccctcccagtccacctcatttagaaaaccaaagtgtgggtagaaaccccaaatgtccaaaagcccttttctggtgggtgacccagtgcatccaacagaaacagccgctgcccgaacctctgtgtgaagctttacgcgcacacggacaaaatgcccaaactggagcccttgcaaaaacacggcttgtggcattggcatacttgcccttacaggtggagtatcttcgtcacacatctaaatgagaaatcagtgacaacaagtctttgaaatggtgctatggatttaccattccttattatcactaatcatctaaacaactcactggaaatccaattaacaattttacaacataagatagaatggagacctgaataattctgtgtaatataaatggtttataactgcttttgtacctagctaggctgctattattactataatgagtaaatcataaagccttcatcactcccacatttttcttacggtcggagcatcagaacaagcgtctagactccttgggaccgtgagttcctagagcttggctgggtctaggctgttctgtgcctccaaggactgtctggcaatgacttgtattggccaccaactgtagatgtatatatggtgcccttctgatgctaagactccagaccttttgtttttgctttgcattttctgattttataccaactgtgtggactaagatgcattaaaataaacatcagagtaactcact

SEQ ID NO: 8 - DNA, 1236 bp, Homo sapiens
acccgagtttgtgtttgaggccaccctgaggatcgggacagctgttcctttgggctgcagaaactccgctgagcagaacttgccgccagaatgctcctcctgttgctgagtatcatcgtcctccacgtcgcggtgctggtgctgctgttcgtctccacgatcgtcagccaatggatcgtgggcaatggacacgcaactgatctctggcagaactgtagcacctcttcctcaggaaatgtccaccactgtttctcatcatcaccaaacgaatggctgcagtctgtccaggccaccatgatcctgtcgatcatcttcagcattctgtctctgttcctgttcttctgccaactcttcaccctcaccaaggggggcaggttttacatcactggaatcttccaaattcttgctggtctgtgcgtgatgagtgctgcggccatctacacggtgaggcacccggagtggcatctcaactcggattactccttccccctggcccttctcagcggtgtcatctatgtgatcttgcggaaacgcgaatgaggcgcccagacggtctgtctgaggctctgagcgtacatagggaagggaggaagggaaaacagaaagcagacaaagaaaaaagagctagcccaaaatcccaaactcaaaccaaaccaaacagaaagcagtggaggtgggggttgctgttgattgaagatgtatataatatccccggtttataaaacctatttataacactttttacatatatgtacatagtattgtttgctttttatgttgaccatcagcctcgtgttgagccttaaagaagtagctaaggaactttacatcctaacagtataatccagctcagtatttttgttttgttttttgtttgtttgttttgttttacccagaaataagataactccatctcgccccttccctttcatctgaaagaagatacctccctcccagtccacctcatttagaaaaccaaagtgtgggtagaaaccccaaatgtccaaaagcccttttctggtgggtgacccagtgcatccaacagaaacagccgctgcccgaacctctgtgtgaagctttacgcgcacacggacaaaatgcccaaactggagcccttgcaaaaacacggcttgtggcattggcatacttgcccttacaggtggagtatcttcgtcacacatctaaatgagaaatcagtgacaacaagtctttgaaatggtgctatggatttaccat

SEQ ID NO: 9 - DNA, 22 bp, Artificial sequence
  Primer
agaaatctgcttggaagaaggg

SEQ ID NO: 10 - DNA, 20 bp, Artificial sequence
  Primer
acgtggaggacgatgatact

SEQ ID NO: 11 - DNA, 23 bp, Artificial sequence
  Probe
agcaacaggaggagcattctggc

SEQ ID NO: 12 - DNA, 18 bp, Artificial sequence
  Primer
gtttgaggccaccctgag

SEQ ID NO: 13 - DNA, 21 bp, Artificial sequence
  Primer
gatactcagcaacaggaggag

SEQ ID NO: 14 - DNA, 24 bp, Artificial sequence
  Probe
agtttctgcagcccaaaggaacag

SEQ ID NO: 15 - DNA, 20 bp, Artificial sequence
  Primer
cttgctggtctgtgcgtgat

SEQ ID NO: 16 - DNA, 24 bp, Artificial sequence
  Primer
accgtaggagtaatccgagttgag

SEQ ID NO: 17 - DNA, 23 bp, Artificial sequence
  Probe
catctacacggtgaggcacccgg

SEQ ID NO: 18 - DNA, 18 bp, Artificial sequence
  Primer
gcaatggacacgcaactg

SEQ ID NO: 19 - DNA, 18 bp, Artificial sequence
  Primer
ggacagactgcagccatt

SEQ ID NO: 20 - DNA, 28 bp, Artificial sequence
  Probe
tgagaaacagtggtggacatttcctgag

SEQ ID NO: 21 - DNA, 21 bp, Artificial sequence
  Primer
ctggtctggcttcagttacag

SEQ ID NO: 22 - DNA, 22 bp, Artificial sequence
  Primer
ccaaatgcaagggatgttaagg

SEQ ID NO: 23 - DNA, 24 bp, Artificial sequence
  Probe
ttggaagctgcaggcttagtctgt

SEQ ID NO: 24 - DNA, 21 bp, Artificial sequence
  Primer
ctcctcctgttgctgagtatc

SEQ ID NO: 25 - DNA, 19 bp, Artificial sequence
  Primer
gctacagttctgccagaga

SEQ ID NO: 26 - DNA, 21 bp, Artificial sequence
  Probe
cagttgcgtgtccattgccca

SEQ ID NO: 27 - DNA, 15 bp, Artificial sequence
  Primer
tcgccgcttgctgca

SEQ ID NO: 28 - DNA, 17 bp, Artificial sequence
  Primer
atcggccgtgatgtcga

SEQ ID NO: 29 - DNA, 23 bp, Artificial sequence
  Probe
ccatggtcaaccccaccgtgttc

SEQ ID NO: 30 - DNA, 16 bp, Artificial sequence
  Synthetic oligonucleotide
atcttcaatcaacagc

SEQ ID NO: 31 - DNA, 16 bp, Artificial sequence
  Synthetic oligonucleotide
attattcaggtctcca

SEQ ID NO: 32 - DNA, 16 bp, Artificial sequence
  Synthetic oligonucleotide
acaagtcattgccaga

SEQ ID NO: 33 - DNA, 16 bp, Artificial sequence
  Synthetic oligonucleotide
atctacagttggtggc

SEQ ID NO: 34 - DNA, 16 bp, Artificial sequence
  Synthetic oligonucleotide
cactcatcacgcacag

SEQ ID NO: 35 - DNA, 16 bp, Artificial sequence
  Synthetic oligonucleotide
gcactcatcacgcaca

SEQ ID NO: 36 - DNA, 16 bp, Artificial sequence
  Synthetic oligonucleotide
cttcaatcaacagcaa

SEQ ID NO: 37 - DNA, 16 bp, Artificial sequence
  Synthetic oligonucleotide
gccaaatgcaagggat

SEQ ID NO: 38 - DNA, 16 bp, Artificial sequence
  Synthetic oligonucleotide
tgcagccaaatgcaag

SEQ ID NO: 39 - DNA, 16 bp, Artificial sequence
  Synthetic oligonucleotide
gcccggccaaacagcg

SEQ ID NO: 40 - DNA, 16 bp, Artificial sequence
  Synthetic oligonucleotide
agtgttataaataggt

SEQ ID NO: 41 - DNA, 16 bp, Artificial sequence
  Synthetic oligonucleotide
gctccctgtaactgaa

SEQ ID NO: 42 - DNA, 16 bp, Artificial sequence
  Synthetic oligonucleotide
cctgtaactgaagcca

SEQ ID NO: 43 - DNA, 16 bp, Artificial sequence
  Synthetic oligonucleotide
tggtgctccctgtaac

SEQ ID NO: 44 - DNA, 16 bp, Artificial sequence
  Synthetic oligonucleotide
cctggtggtgctccct

SEQ ID NO: 45 - DNA, 16 bp, Artificial sequence
  Synthetic oligonucleotide
tgttccctggtggtgc

SEQ ID NO: 46 - DNA, 16 bp, Artificial sequence
  Synthetic oligonucleotide
ccccgagatgttccct

SEQ ID NO: 47 - DNA, 16 bp, Artificial sequence
  Synthetic oligonucleotide
ggctccccgagatgtt

SEQ ID NO: 48 - DNA, 16 bp, Artificial sequence
  Synthetic oligonucleotide
accaggctccccgaga

SEQ ID NO: 49 - DNA, 16 bp, Artificial sequence
  Synthetic oligonucleotide
tccaaccaggctcccc

SEQ ID NO: 50 - DNA, 16 bp, Artificial sequence
  Synthetic oligonucleotide
cagcttccaaccaggc

SEQ ID NO: 51 - DNA, 16 bp, Artificial sequence
  Synthetic oligonucleotide
gactaagcctgcagct

SEQ ID NO: 52 - DNA, 16 bp, Artificial sequence
  Synthetic oligonucleotide
gacagactaagcctgc

SEQ ID NO: 53 - DNA, 16 bp, Artificial sequence
  Synthetic oligonucleotide
ccgcagccgacagact

SEQ ID NO: 54 - DNA, 16 bp, Artificial sequence
  Synthetic oligonucleotide
agacccgcagccgaca

SEQ ID NO: 55 - DNA, 16 bp, Artificial sequence
  Synthetic oligonucleotide
tcagagacccgcagcc

SEQ ID NO: 56 - DNA, 16 bp, Artificial sequence
  Synthetic oligonucleotide
gatgttaaggcaagac

SEQ ID NO: 57 - DNA, 16 bp, Artificial sequence
  Synthetic oligonucleotide
aagggatgttaaggca

SEQ ID NO: 58 - DNA, 16 bp, Artificial sequence
  Synthetic oligonucleotide
atgcaagggatgttaa

SEQ ID NO: 59 - DNA, 16 bp, Artificial sequence
  Synthetic oligonucleotide
accccttcttccaagc

SEQ ID NO: 60 - DNA, 16 bp, Artificial sequence
  Synthetic oligonucleotide
ttctgcccggccaaac

SEQ ID NO: 61 - DNA, 16 bp, Artificial sequence
  Synthetic oligonucleotide
gagtttctgcccggcc

SEQ ID NO: 62 - DNA, 16 bp, Artificial sequence
  Synthetic oligonucleotide
agcggagtttctgccc

SEQ ID NO: 63 - DNA, 16 bp, Artificial sequence
  Synthetic oligonucleotide
ataaaactcacccggc

SEQ ID NO: 64 - DNA, 16 bp, Artificial sequence
  Synthetic oligonucleotide
aggcacagtttgccaa

SEQ ID NO: 65 - DNA, 16 bp, Artificial sequence
  Synthetic oligonucleotide
taaagcataggcacac

SEQ ID NO: 66 - DNA, 16 bp, Artificial sequence
  Synthetic oligonucleotide
aggcaattcttgtaaa

SEQ ID NO: 67 - DNA, 16 bp, Artificial sequence
  Synthetic oligonucleotide
gtcaattccaacacaa

SEQ ID NO: 68 - DNA, 16 bp, Artificial sequence
  Synthetic oligonucleotide
aggatataaaaagccc

SEQ ID NO: 69 - DNA, 16 bp, Artificial sequence
  Synthetic oligonucleotide
ttcaatctggatgcat

SEQ ID NO: 70 - DNA, 16 bp, Artificial sequence
  Synthetic oligonucleotide
tgcttaccaaggccac

SEQ ID NO: 71 - DNA, 16 bp, Artificial sequence
  Synthetic oligonucleotide
acccaacccatctgtc

SEQ ID NO: 72 - DNA, 16 bp, Artificial sequence
  Synthetic oligonucleotide
ccagacaggtaaaccc

SEQ ID NO: 73 - DNA, 16 bp, Artificial sequence
  Synthetic oligonucleotide
caataaccacccaggt

SEQ ID NO: 74 - DNA, 16 bp, Artificial sequence
  Synthetic oligonucleotide
tgctacagctcgcttc

SEQ ID NO: 75 - DNA, 16 bp, Artificial sequence
  Synthetic oligonucleotide
agtctaatacacatac

SEQ ID NO: 76 - DNA, 16 bp, Artificial sequence
  Synthetic oligonucleotide
catatctaactcaggg

SEQ ID NO: 77 - DNA, 16 bp, Artificial sequence
  Synthetic oligonucleotide
aagtaagcactttaga

SEQ ID NO: 78 - DNA, 16 bp, Artificial sequence
  Synthetic oligonucleotide
acaacatactcaggac

SEQ ID NO: 79 - DNA, 16 bp, Artificial sequence
  Synthetic oligonucleotide
acttatgtgatcacaa

SEQ ID NO: 80 - DNA, 16 bp, Artificial sequence
  Synthetic oligonucleotide
ggtcattttataagtt

SEQ ID NO: 81 - DNA, 16 bp, Artificial sequence
  Synthetic oligonucleotide
aaagacatggcagtgt

SEQ ID NO: 82 - DNA, 16 bp, Artificial sequence
  Synthetic oligonucleotide
actaaagtagcttgta

SEQ ID NO: 83 - DNA, 16 bp, Artificial sequence
  Synthetic oligonucleotide
tctcacatcaaccttt

SEQ ID NO: 84 - DNA, 16 bp, Artificial sequence
  Synthetic oligonucleotide
cataataagggcccag

SEQ ID NO: 85 - DNA, 16 bp, Artificial sequence
  Synthetic oligonucleotide
aggaaatagtaatgcc

SEQ ID NO: 86 - DNA, 16 bp, Artificial sequence
  Synthetic oligonucleotide
gaatttgggcaatttc

SEQ ID NO: 87 - DNA, 16 bp, Artificial sequence
  Synthetic oligonucleotide
gtgagaggcagtatgg

SEQ ID NO: 88 - DNA, 16 bp, Artificial sequence
  Synthetic oligonucleotide
cttcaaacaatgatct

SEQ ID NO: 89 - DNA, 16 bp, Artificial sequence
  Synthetic oligonucleotide
tattcttacggtaagt

SEQ ID NO: 90 - DNA, 16 bp, Artificial sequence
  Synthetic oligonucleotide
agctgctattttagct

SEQ ID NO: 91 - DNA, 16 bp, Artificial sequence
  Synthetic oligonucleotide
tcatagaagctcatca

SEQ ID NO: 92 - DNA, 16 bp, Artificial sequence
  Synthetic oligonucleotide
gagcaggaatgtggat

SEQ ID NO: 93 - DNA, 16 bp, Artificial sequence
  Synthetic oligonucleotide
cccttcagtctcggct

SEQ ID NO: 94 - DNA, 16 bp, Artificial sequence
  Synthetic oligonucleotide
gtgcgaggtggccatt

SEQ ID NO: 95 - DNA, 16 bp, Artificial sequence
  Synthetic oligonucleotide
gaataagctctaggca

SEQ ID NO: 96 - DNA, 16 bp, Artificial sequence
  Synthetic oligonucleotide
gcaaaaccagactacc

SEQ ID NO: 97 - DNA, 16 bp, Artificial sequence
  Synthetic oligonucleotide
ggaagaaaagtccggc

SEQ ID NO: 98 - DNA, 16 bp, Artificial sequence
  Synthetic oligonucleotide
ttcctaggattggcgg

SEQ ID NO: 99 - DNA, 16 bp, Artificial sequence
  Synthetic oligonucleotide
tgcacctacgaagcat

SEQ ID NO: 100 - DNA, 16 bp, Artificial sequence
  Synthetic oligonucleotide
ctggaagaagtccctc

SEQ ID NO: 101 - DNA, 16 bp, Artificial sequence
  Synthetic oligonucleotide
agctcagcggatgccc

SEQ ID NO: 102 - DNA, 16 bp, Artificial sequence
  Synthetic oligonucleotide
ggctgagctttctcac

SEQ ID NO: 103 - DNA, 16 bp, Artificial sequence
  Synthetic oligonucleotide
cttttactcgaaacca

SEQ ID NO: 104 - DNA, 16 bp, Artificial sequence
  Synthetic oligonucleotide
tgcaaaaccgcggcga

SEQ ID NO: 105 - DNA, 16 bp, Artificial sequence
  Synthetic oligonucleotide
aagaaaaagtcggtcc

SEQ ID NO: 106 - DNA, 16 bp, Artificial sequence
  Synthetic oligonucleotide
ttaaatgcgcctcaag

SEQ ID NO: 107 - DNA, 16 bp, Artificial sequence
  Synthetic oligonucleotide
caggagacagtcactt

SEQ ID NO: 108 - DNA, 16 bp, Artificial sequence
  Synthetic oligonucleotide
tgtaactgaagccaga

SEQ ID NO: 109 - DNA, 16 bp, Artificial sequence
  Synthetic oligonucleotide
gtgctccctgtaactg

SEQ ID NO: 110 - DNA, 16 bp, Artificial sequence
  Synthetic oligonucleotide
caggctccccgagatg

SEQ ID NO: 111 - DNA, 16 bp, Artificial sequence
  Synthetic oligonucleotide
acccgcagccgacaga

SEQ ID NO: 112 - DNA, 16 bp, Artificial sequence
  Synthetic oligonucleotide
agagacccgcagccga

SEQ ID NO: 113 - DNA, 16 bp, Artificial sequence
  Synthetic oligonucleotide
agtcagagacccgcag

SEQ ID NO: 114 - DNA, 16 bp, Artificial sequence
  Synthetic oligonucleotide
gggatgttaaggcaag

SEQ ID NO: 115 - DNA, 16 bp, Artificial sequence
  Synthetic oligonucleotide
aaatgcaagggatgtt

SEQ ID NO: 116 - DNA, 16 bp, Artificial sequence
  Synthetic oligonucleotide
cttccaagcagatttc

SEQ ID NO: 117 - DNA, 16 bp, Artificial sequence
  Synthetic oligonucleotide
cggagtttctgcccgg

SEQ ID NO: 118 - DNA, 16 bp, Artificial sequence
  Synthetic oligonucleotide
tccctgtaactgaagc

SEQ ID NO: 119 - DNA, 16 bp, Artificial sequence
  Synthetic oligonucleotide
tgaagccagaccaggc

SEQ ID NO: 120 - DNA, 16 bp, Artificial sequence
  Synthetic oligonucleotide
ggtggtgctccctgta

SEQ ID NO: 121 - DNA, 16 bp, Artificial sequence
  Synthetic oligonucleotide
tccctggtggtgctcc

SEQ ID NO: 122 - DNA, 16 bp, Artificial sequence
  Synthetic oligonucleotide
gatgttccctggtggt

SEQ ID NO: 123 - DNA, 16 bp, Artificial sequence
  Synthetic oligonucleotide
ccgagatgttccctgg

SEQ ID NO: 124 - DNA, 16 bp, Artificial sequence
  Synthetic oligonucleotide
ctccccgagatgttcc

SEQ ID NO: 125 - DNA, 16 bp, Artificial sequence
  Synthetic oligonucleotide
caaccaggctccccga

SEQ ID NO: 126 - DNA, 16 bp, Artificial sequence
  Synthetic oligonucleotide
gcttccaaccaggctc

SEQ ID NO: 127 - DNA, 16 bp, Artificial sequence
  Synthetic oligonucleotide
tgcagcttccaaccag

SEQ ID NO: 128 - DNA, 16 bp, Artificial sequence
  Synthetic oligonucleotide
ctaagcctgcagcttc

SEQ ID NO: 129 - DNA, 16 bp, Artificial sequence
  Synthetic oligonucleotide
cagactaagcctgcag

SEQ ID NO: 130 - DNA, 16 bp, Artificial sequence
  Synthetic oligonucleotide
ccgacagactaagcct

SEQ ID NO: 131 - DNA, 16 bp, Artificial sequence
  Synthetic oligonucleotide
gcagccgacagactaa

SEQ ID NO: 132 - DNA, 16 bp, Artificial sequence
  Synthetic oligonucleotide
gggcagtcagagaccc

SEQ ID NO: 133 - DNA, 16 bp, Artificial sequence
  Synthetic oligonucleotide
tgttaaggcaagaccc

SEQ ID NO: 134 - DNA, 16 bp, Artificial sequence
  Synthetic oligonucleotide
gcaagggatgttaagg

SEQ ID NO: 135 - DNA, 16 bp, Artificial sequence
  Synthetic oligonucleotide
caaatgcaagggatgt

SEQ ID NO: 136 - DNA, 16 bp, Artificial sequence
  Synthetic oligonucleotide
cagccaaatgcaaggg

SEQ ID NO: 137 - DNA, 16 bp, Artificial sequence
  Synthetic oligonucleotide
gtaaccccttcttcca

SEQ ID NO: 138 - DNA, 16 bp, Artificial sequence
  Synthetic oligonucleotide
ctgcccggccaaacag

SEQ ID NO: 139 - DNA, 16 bp, Artificial sequence
  Synthetic oligonucleotide
gtttctgcccggccaa

SEQ ID NO: 140 - DNA, 16 bp, Artificial sequence
  Synthetic oligonucleotide
gccaataaaactcacc

SEQ ID NO: 141 - DNA, 16 bp, Artificial sequence
  Synthetic oligonucleotide
catcacccagaggcac

SEQ ID NO: 142 - DNA, 16 bp, Artificial sequence
  Synthetic oligonucleotide
ttgtaaagcataggca

SEQ ID NO: 143 - DNA, 16 bp, Artificial sequence
  Synthetic oligonucleotide
ttcatttgcggcttgc

SEQ ID NO: 144 - DNA, 16 bp, Artificial sequence
  Synthetic oligonucleotide
tataaaaagccctctg

SEQ ID NO: 145 - DNA, 16 bp, Artificial sequence
  Synthetic oligonucleotide
cattagggtttctaga

SEQ ID NO: 146 - DNA, 16 bp, Artificial sequence
  Synthetic oligonucleotide
gtgcacagctattttc

SEQ ID NO: 147 - DNA, 16 bp, Artificial sequence
  Synthetic oligonucleotide
gaccaggcttgccaca

SEQ ID NO: 148 - DNA, 16 bp, Artificial sequence
  Synthetic oligonucleotide
ggtaaacccaacccat

SEQ ID NO: 149 - DNA, 16 bp, Artificial sequence
  Synthetic oligonucleotide
ccatatactgccagac

SEQ ID NO: 150 - DNA, 16 bp, Artificial sequence
  Synthetic oligonucleotide
tttaatcaataaccac

SEQ ID NO: 151 - DNA, 16 bp, Artificial sequence
  Synthetic oligonucleotide
gcatatattgggtgct

SEQ ID NO: 152 - DNA, 16 bp, Artificial sequence
  Synthetic oligonucleotide
tatctaactcagggtt

SEQ ID NO: 153 - DNA, 16 bp, Artificial sequence
  Synthetic oligonucleotide
atatgagcatatctaa

SEQ ID NO: 154 - DNA, 16 bp, Artificial sequence
  Synthetic oligonucleotide
caggactgttctaagt

SEQ ID NO: 155 - DNA, 16 bp, Artificial sequence
  Synthetic oligonucleotide
tcacaacatactcagg

SEQ ID NO: 156 - DNA, 16 bp, Artificial sequence
  Synthetic oligonucleotide
caacacttatgtgatc

SEQ ID NO: 157 - DNA, 16 bp, Artificial sequence
  Synthetic oligonucleotide
ctccacaggtcatttt

SEQ ID NO: 158 - DNA, 16 bp, Artificial sequence
  Synthetic oligonucleotide
gcatatgcaagtagaa

SEQ ID NO: 159 - DNA, 16 bp, Artificial sequence
  Synthetic oligonucleotide
gggaagacctgaccac

SEQ ID NO: 160 - DNA, 16 bp, Artificial sequence
  Synthetic oligonucleotide
gcccaaattgccacca

SEQ ID NO: 161 - DNA, 16 bp, Artificial sequence
  Synthetic oligonucleotide
caaagcagttaacatc

SEQ ID NO: 162 - DNA, 16 bp, Artificial sequence
  Synthetic oligonucleotide
ctcaagttcactgagc

SEQ ID NO: 163 - DNA, 16 bp, Artificial sequence
  Synthetic oligonucleotide
aacaaacctaatcacc

SEQ ID NO: 164 - DNA, 16 bp, Artificial sequence
  Synthetic oligonucleotide
tacttgtaaacactgc

SEQ ID NO: 165 - DNA, 16 bp, Artificial sequence
  Synthetic oligonucleotide
tcttacggtaagtaaa

SEQ ID NO: 166 - DNA, 16 bp, Artificial sequence
  Synthetic oligonucleotide
gctattttagctaatt

SEQ ID NO: 167 - DNA, 16 bp, Artificial sequence
  Synthetic oligonucleotide
ttattttacgatttga

SEQ ID NO: 168 - DNA, 16 bp, Artificial sequence
  Synthetic oligonucleotide
tgtcatagaagctcat

SEQ ID NO: 169 - DNA, 16 bp, Artificial sequence
  Synthetic oligonucleotide
actgagactcccgtgc

SEQ ID NO: 170 - DNA, 16 bp, Artificial sequence
  Synthetic oligonucleotide
cgttacagggagagag

SEQ ID NO: 171 - DNA, 16 bp, Artificial sequence
  Synthetic oligonucleotide
ggcaaagtgttcctgc

SEQ ID NO: 172 - DNA, 16 bp, Artificial sequence
  Synthetic oligonucleotide
cagactaccaccgaat

SEQ ID NO: 173 - DNA, 16 bp, Artificial sequence
  Synthetic oligonucleotide
ggatagcatggtctgg

SEQ ID NO: 174 - DNA, 16 bp, Artificial sequence
  Synthetic oligonucleotide
attgatctagcgggct

SEQ ID NO: 175 - DNA, 16 bp, Artificial sequence
  Synthetic oligonucleotide
acgaagcatgccagct

SEQ ID NO: 176 - DNA, 16 bp, Artificial sequence
  Synthetic oligonucleotide
agccggacacacctgc

SEQ ID NO: 177 - DNA, 16 bp, Artificial sequence
  Synthetic oligonucleotide
cgccgaccgcgcccgc

SEQ ID NO: 178 - DNA, 16 bp, Artificial sequence
  Synthetic oligonucleotide
gaagacccagccaaat

SEQ ID NO: 179 - DNA, 16 bp, Artificial sequence
  Synthetic oligonucleotide
tcgaaaccagaggcgg

SEQ ID NO: 180 - DNA, 16 bp, Artificial sequence
  Synthetic oligonucleotide
aaccgcggcgactttt

SEQ ID NO: 181 - DNA, 16 bp, Artificial sequence
  Synthetic oligonucleotide
aaaaagtcggtccctg

SEQ ID NO: 182 - DNA, 16 bp, Artificial sequence
  Synthetic oligonucleotide
tcaagaaaaagtcggt

SEQ ID NO: 183 - DNA, 16 bp, Artificial sequence
  Synthetic oligonucleotide
agtcacttggccttaa

SEQ ID NO: 184 - DNA, 16 bp, Artificial sequence
  Synthetic oligonucleotide
ctgcagtagggtgtgt

SEQ ID NO: 185 - DNA, 16 bp, Artificial sequence
  Synthetic oligonucleotide
aactgaagccagacca

SEQ ID NO: 186 - DNA, 16 bp, Artificial sequence
  Synthetic oligonucleotide
ctccctgtaactgaag

SEQ ID NO: 187 - DNA, 16 bp, Artificial sequence
  Synthetic oligonucleotide
ctggtggtgctccctg

SEQ ID NO: 188 - DNA, 16 bp, Artificial sequence
  Synthetic oligonucleotide
ccaaccaggctccccg

SEQ ID NO: 189 - DNA, 16 bp, Artificial sequence
  Synthetic oligonucleotide
agcttccaaccaggct

SEQ ID NO: 190 - DNA, 16 bp, Artificial sequence
  Synthetic oligonucleotide
actaagcctgcagctt

SEQ ID NO: 191 - DNA, 16 bp, Artificial sequence
  Synthetic oligonucleotide
acagactaagcctgca

SEQ ID NO: 192 - DNA, 16 bp, Artificial sequence
  Synthetic oligonucleotide
cagagacccgcagccg

SEQ ID NO: 193 - DNA, 16 bp, Artificial sequence
  Synthetic oligonucleotide
tgcaagggatgttaag

SEQ ID NO: 194 - DNA, 16 bp, Artificial sequence
  Synthetic oligonucleotide
cttcttccaagcagat

SEQ ID NO: 195 - DNA, 16 bp, Artificial sequence
  Synthetic oligonucleotide
ctgtaactgaagccag

SEQ ID NO: 196 - DNA, 16 bp, Artificial sequence
  Synthetic oligonucleotide
ggtgctccctgtaact

SEQ ID NO: 197 - DNA, 16 bp, Artificial sequence
  Synthetic oligonucleotide
ttccctggtggtgctc

SEQ ID NO: 198 - DNA, 16 bp, Artificial sequence
  Synthetic oligonucleotide
agatgttccctggtgg

SEQ ID NO: 199 - DNA, 16 bp, Artificial sequence
  Synthetic oligonucleotide
cccgagatgttccctg

SEQ ID NO: 200 - DNA, 16 bp, Artificial sequence
  Synthetic oligonucleotide
gctccccgagatgttc

SEQ ID NO: 201 - DNA, 16 bp, Artificial sequence
  Synthetic oligonucleotide
ccaggctccccgagat

SEQ ID NO: 202 - DNA, 16 bp, Artificial sequence
  Synthetic oligonucleotide
ctgcagcttccaacca

SEQ ID NO: 203 - DNA, 16 bp, Artificial sequence
  Synthetic oligonucleotide
gccgacagactaagcc

SEQ ID NO: 204 - DNA, 16 bp, Artificial sequence
  Synthetic oligonucleotide
cgcagccgacagacta

SEQ ID NO: 205 - DNA, 16 bp, Artificial sequence
  Synthetic oligonucleotide
gacccgcagccgacag

SEQ ID NO: 206 - DNA, 16 bp, Artificial sequence
  Synthetic oligonucleotide
cagtcagagacccgca

SEQ ID NO: 207 - DNA, 16 bp, Artificial sequence
  Synthetic oligonucleotide
agggcagtcagagacc

SEQ ID NO: 208 - DNA, 16 bp, Artificial sequence
  Synthetic oligonucleotide
atgttaaggcaagacc

SEQ ID NO: 209 - DNA, 16 bp, Artificial sequence
  Synthetic oligonucleotide
agggatgttaaggcaa

SEQ ID NO: 210 - DNA, 16 bp, Artificial sequence
  Synthetic oligonucleotide
ccaaatgcaagggatg

SEQ ID NO: 211 - DNA, 16 bp, Artificial sequence
  Synthetic oligonucleotide
gcagccaaatgcaagg

SEQ ID NO: 212 - DNA, 16 bp, Artificial sequence
  Synthetic oligonucleotide
cgtaaccccttcttcc

SEQ ID NO: 213 - DNA, 16 bp, Artificial sequence
  Synthetic oligonucleotide
tctgcccggccaaaca

SEQ ID NO: 214 - DNA, 16 bp, Artificial sequence
  Synthetic oligonucleotide
agtttctgcccggcca

SEQ ID NO: 215 - DNA, 16 bp, Artificial sequence
  Synthetic oligonucleotide
gcggagtttctgcccg

SEQ ID NO: 216 - DNA, 16 bp, Artificial sequence
  Synthetic oligonucleotide
taaaactcacccggcc

SEQ ID NO: 217 - DNA, 16 bp, Artificial sequence
  Synthetic oligonucleotide
tgccaataaaactcac

SEQ ID NO: 218 - DNA, 16 bp, Artificial sequence
  Synthetic oligonucleotide
acacatcacccagagg

SEQ ID NO: 219 - DNA, 16 bp, Artificial sequence
  Synthetic oligonucleotide
ggcaattcttgtaaag

SEQ ID NO: 220 - DNA, 16 bp, Artificial sequence
  Synthetic oligonucleotide
cttttcatttgcggct

SEQ ID NO: 221 - DNA, 16 bp, Artificial sequence
  Synthetic oligonucleotide
ggatataaaaagccct

SEQ ID NO: 222 - DNA, 16 bp, Artificial sequence
  Synthetic oligonucleotide
gcattagggtttctag

SEQ ID NO: 223 - DNA, 16 bp, Artificial sequence
  Synthetic oligonucleotide
gcttaccaaggccacc

SEQ ID NO: 224 - DNA, 16 bp, Artificial sequence
  Synthetic oligonucleotide
gaggaagtgctactca

SEQ ID NO: 225 - DNA, 16 bp, Artificial sequence
  Synthetic oligonucleotide
agacaggtaaacccaa

SEQ ID NO: 226 - DNA, 16 bp, Artificial sequence
  Synthetic oligonucleotide
ccacaccatatactgc

SEQ ID NO: 227 - DNA, 16 bp, Artificial sequence
  Synthetic oligonucleotide
agtttaatcaataacc

SEQ ID NO: 228 - DNA, 16 bp, Artificial sequence
  Synthetic oligonucleotide
gtgcatatattgggtg

SEQ ID NO: 229 - DNA, 16 bp, Artificial sequence
  Synthetic oligonucleotide
atatctaactcagggt

SEQ ID NO: 230 - DNA, 16 bp, Artificial sequence
  Synthetic oligonucleotide
gaaatatgagcatatc

SEQ ID NO: 231 - DNA, 16 bp, Artificial sequence
  Synthetic oligonucleotide
caacatactcaggact

SEQ ID NO: 232 - DNA, 16 bp, Artificial sequence
  Synthetic oligonucleotide
gatcacaacatactca

SEQ ID NO: 233 - DNA, 16 bp, Artificial sequence
  Synthetic oligonucleotide
aaccaacacttatgtg

SEQ ID NO: 234 - DNA, 16 bp, Artificial sequence
  Synthetic oligonucleotide
agacatggcagtgttt

SEQ ID NO: 235 - DNA, 16 bp, Artificial sequence
  Synthetic oligonucleotide
taaagtagcttgtaac

SEQ ID NO: 236 - DNA, 16 bp, Artificial sequence
  Synthetic oligonucleotide
agggaagacctgacca

SEQ ID NO: 237 - DNA, 16 bp, Artificial sequence
  Synthetic oligonucleotide
ataataagggcccagt

SEQ ID NO: 238 - DNA, 16 bp, Artificial sequence
  Synthetic oligonucleotide
gctttaaaggtttatg

SEQ ID NO: 239 - DNA, 16 bp, Artificial sequence
  Synthetic oligonucleotide
gggcaatttctcaagt

SEQ ID NO: 240 - DNA, 16 bp, Artificial sequence
  Synthetic oligonucleotide
gtgcagtggttaggca

SEQ ID NO: 241 - DNA, 16 bp, Artificial sequence
  Synthetic oligonucleotide
aatgaagtgtacttgt

SEQ ID NO: 242 - DNA, 16 bp, Artificial sequence
  Synthetic oligonucleotide
ttcttacggtaagtaa

SEQ ID NO: 243 - DNA, 16 bp, Artificial sequence
  Synthetic oligonucleotide
tgctattttagctaat

SEQ ID NO: 244 - DNA, 16 bp, Artificial sequence
  Synthetic oligonucleotide
tagaagctcatcactc

SEQ ID NO: 245 - DNA, 16 bp, Artificial sequence
  Synthetic oligonucleotide
cagcagttcacgcacg

SEQ ID NO: 246 - DNA, 16 bp, Artificial sequence
  Synthetic oligonucleotide
tggcagaggcgcgccc

SEQ ID NO: 247 - DNA, 16 bp, Artificial sequence
  Synthetic oligonucleotide
aatcagctgattcata

SEQ ID NO: 248 - DNA, 16 bp, Artificial sequence
  Synthetic oligonucleotide
ctctaggcaaagtgtt

SEQ ID NO: 249 - DNA, 16 bp, Artificial sequence
  Synthetic oligonucleotide
caaaaccagactacca

SEQ ID NO: 250 - DNA, 16 bp, Artificial sequence
  Synthetic oligonucleotide
gaagaaaagtccggcc

SEQ ID NO: 251 - DNA, 16 bp, Artificial sequence
  Synthetic oligonucleotide
tcctaggattggcggg

SEQ ID NO: 252 - DNA, 16 bp, Artificial sequence
  Synthetic oligonucleotide
cacctacgaagcatgc

SEQ ID NO: 253 - DNA, 16 bp, Artificial sequence
  Synthetic oligonucleotide
gaagaagtccctctcc

SEQ ID NO: 254 - DNA, 16 bp, Artificial sequence
  Synthetic oligonucleotide
tctgggcccgccgacg

SEQ ID NO: 255 - DNA, 16 bp, Artificial sequence
  Synthetic oligonucleotide
cgagaaactggctcct

SEQ ID NO: 256 - DNA, 16 bp, Artificial sequence
  Synthetic oligonucleotide
ttttactcgaaaccag

SEQ ID NO: 257 - DNA, 16 bp, Artificial sequence
  Synthetic oligonucleotide
gcaaaaccgcggcgac

SEQ ID NO: 258 - DNA, 16 bp, Artificial sequence
  Synthetic oligonucleotide
agaaaaagtcggtccc

SEQ ID NO: 259 - DNA, 16 bp, Artificial sequence
  Synthetic oligonucleotide
ctcaagaaaaagtcgg

SEQ ID NO: 260 - DNA, 16 bp, Artificial sequence
  Synthetic oligonucleotide
ggagacagtcacttgg

SEQ ID NO: 261 - DNA, 16 bp, Artificial sequence
  Synthetic oligonucleotide
cctttaacgggaacaa

SEQ ID NO: 262 - DNA, 16 bp, Artificial sequence
  Synthetic oligonucleotide
cgtctttccagtttat

SEQ ID NO: 263 - DNA, 16 bp, Artificial sequence
  Synthetic oligonucleotide
taactgaagccagacc

SEQ ID NO: 264 - DNA, 16 bp, Artificial sequence
  Synthetic oligonucleotide
gagatgttccctggtg

SEQ ID NO: 265 - DNA, 16 bp, Artificial sequence
  Synthetic oligonucleotide
gcctgcagcttccaac

SEQ ID NO: 266 - DNA, 16 bp, Artificial sequence
  Synthetic oligonucleotide
agccgacagactaagc

SEQ ID NO: 267 - DNA, 16 bp, Artificial sequence
  Synthetic oligonucleotide
gcagtcagagacccgc

SEQ ID NO: 268 - DNA, 16 bp, Artificial sequence
  Synthetic oligonucleotide
tgagatgccactccgg

SEQ ID NO: 269 - DNA, 16 bp, Artificial sequence
  Synthetic oligonucleotide
gacaccgctgagaagg

SEQ ID NO: 270 - DNA, 16 bp, Artificial sequence
  Synthetic oligonucleotide
ttgggctagctctttt

SEQ ID NO: 271 - DNA, 16 bp, Artificial sequence
  Synthetic oligonucleotide
ctcaacacgaggctga

SEQ ID NO: 272 - DNA, 16 bp, Artificial sequence
  Synthetic oligonucleotide
agctggattatactgt

SEQ ID NO: 273 - DNA, 16 bp, Artificial sequence
  Synthetic oligonucleotide
ttctaaatgaggtgga

SEQ ID NO: 274 - DNA, 16 bp, Artificial sequence
  Synthetic oligonucleotide
gcagcggctgtttctg

SEQ ID NO: 275 - DNA, 16 bp, Artificial sequence
  Synthetic oligonucleotide
cgtgtttttgcaaggg

SEQ ID NO: 276 - DNA, 16 bp, Artificial sequence
  Synthetic oligonucleotide
ccacctgtaagggcaa

SEQ ID NO: 277 - DNA, 16 bp, Artificial sequence
  Synthetic oligonucleotide
aagacttgttgtcact

SEQ ID NO: 278 - DNA, 16 bp, Artificial sequence
  Synthetic oligonucleotide
gctaggtacaaaagca

SEQ ID NO: 279 - DNA, 16 bp, Artificial sequence
  Synthetic oligonucleotide
tgatgctccgaccgta

SEQ ID NO: 280 - DNA, 16 bp, Artificial sequence
  Synthetic oligonucleotide
acagcctagacccagc

SEQ ID NO: 281 - DNA, 16 bp, Artificial sequence
  Synthetic oligonucleotide
gcatcagaagggcacc

SEQ ID NO: 282 - DNA, 16 bp, Artificial sequence
  Synthetic oligonucleotide
gttggctccgctgctg

SEQ ID NO: 283 - DNA, 16 bp, Artificial sequence
  Synthetic oligonucleotide
gagcgacggaggcgcg

SEQ ID NO: 284 - DNA, 16 bp, Artificial sequence
  Synthetic oligonucleotide
tgcctgcgaggagagc

SEQ ID NO: 285 - DNA, 16 bp, Artificial sequence
  Synthetic oligonucleotide
aatcccggtaaccaca

SEQ ID NO: 286 - DNA, 16 bp, Artificial sequence
  Synthetic oligonucleotide
aggcaccccactaatt

SEQ ID NO: 287 - DNA, 16 bp, Artificial sequence
  Synthetic oligonucleotide
tatattgggtgctaca

SEQ ID NO: 288 - DNA, 16 bp, Artificial sequence
  Synthetic oligonucleotide
gcgcaggccagccttg

SEQ ID NO: 289 - DNA, 16 bp, Artificial sequence
  Synthetic oligonucleotide
gccgaccgcgcccgcg

SEQ ID NO: 290 - DNA, 16 bp, Artificial sequence
  Synthetic oligonucleotide
cgctatccagacacca

SEQ ID NO: 291 - DNA, 16 bp, Artificial sequence
  Synthetic oligonucleotide
gagtagatgtccagcg

SEQ ID NO: 292 - DNA, 16 bp, Artificial sequence
  Synthetic oligonucleotide
ctccgagaccccggtt

SEQ ID NO: 293 - DNA, 16 bp, Artificial sequence
  Synthetic oligonucleotide
cttcaacgaggctgca

SEQ ID NO: 294 - DNA, 16 bp, Artificial sequence
  Synthetic oligonucleotide
actcaaccttagacac

SEQ ID NO: 295 - DNA, 16 bp, Artificial sequence
  Synthetic oligonucleotide
gcactaagggcatgtc

SEQ ID NO: 296 - DNA, 16 bp, Artificial sequence
  Synthetic oligonucleotide
ggtacctagttggtgc

SEQ ID NO: 297 - DNA, 16 bp, Artificial sequence
  Synthetic oligonucleotide
tataatgcttcagctg

SEQ ID NO: 298 - DNA, 16 bp, Artificial sequence
  Synthetic oligonucleotide
caacttagcaactcct

SEQ ID NO: 299 - DNA, 16 bp, Artificial sequence
  Synthetic oligonucleotide
cgccacttaaggctga

SEQ ID NO: 300 - DNA, 16 bp, Artificial sequence
  Synthetic oligonucleotide
gtcaaagtcagttagt

SEQ ID NO: 301 - DNA, 16 bp, Artificial sequence
  Synthetic oligonucleotide
aaccagaacactagcc

SEQ ID NO: 302 - DNA, 16 bp, Artificial sequence
  Synthetic oligonucleotide
agagaagcctcaacag

SEQ ID NO: 303 - DNA, 16 bp, Artificial sequence
  Synthetic oligonucleotide
acttaacagaagcagg

SEQ ID NO: 304 - DNA, 16 bp, Artificial sequence
  Synthetic oligonucleotide
aactacgccaagctcc

SEQ ID NO: 305 - DNA, 16 bp, Artificial sequence
  Synthetic oligonucleotide
cattcaatagcagggc

SEQ ID NO: 306 - DNA, 16 bp, Artificial sequence
  Synthetic oligonucleotide
gctgagggagccacga

SEQ ID NO: 307 - DNA, 16 bp, Artificial sequence
  Synthetic oligonucleotide
ggctcaatagagttga

SEQ ID NO: 308 - DNA, 16 bp, Artificial sequence
  Synthetic oligonucleotide
ccctaactccctacat

SEQ ID NO: 309 - DNA, 16 bp, Artificial sequence
  Synthetic oligonucleotide
cgtcaactgtttgaag

SEQ ID NO: 310 - DNA, 16 bp, Artificial sequence
  Synthetic oligonucleotide
ctcgatgccacaatta

SEQ ID NO: 311 - DNA, 16 bp, Artificial sequence
  Synthetic oligonucleotide
gtgcattgtacgatga

SEQ ID NO: 312 - DNA, 16 bp, Artificial sequence
  Synthetic oligonucleotide
gggtattttagctaga

SEQ ID NO: 313 - DNA, 16 bp, Artificial sequence
  Synthetic oligonucleotide
cccaagaccaggactc

SEQ ID NO: 314 - DNA, 16 bp, Artificial sequence
  Synthetic oligonucleotide
agccaatatccaacct

SEQ ID NO: 315 - DNA, 16 bp, Artificial sequence
  Synthetic oligonucleotide
tgcctttgtatcacaa

SEQ ID NO: 316 - DNA, 16 bp, Artificial sequence
  Synthetic oligonucleotide
ggtaacaaccagcgca

SEQ ID NO: 317 - DNA, 16 bp, Artificial sequence
  Synthetic oligonucleotide
acacaacatgtcatca

SEQ ID NO: 318 - DNA, 16 bp, Artificial sequence
  Synthetic oligonucleotide
agataccacctaccag

SEQ ID NO: 319 - DNA, 16 bp, Artificial sequence
  Synthetic oligonucleotide
ataacatggcctgaaa

SEQ ID NO: 320 - DNA, 16 bp, Artificial sequence
  Synthetic oligonucleotide
agcatagaggttcttc

SEQ ID NO: 321 - DNA, 16 bp, Artificial sequence
  Synthetic oligonucleotide
tcctagattttcacct

SEQ ID NO: 322 - DNA, 16 bp, Artificial sequence
  Synthetic oligonucleotide
cgggaatggctgttag

SEQ ID NO: 323 - DNA, 16 bp, Artificial sequence
  Synthetic oligonucleotide
ttctaagtcccaagtt

SEQ ID NO: 324 - DNA, 16 bp, Artificial sequence
  Synthetic oligonucleotide
ttaaggagacctctca

SEQ ID NO: 325 - DNA, 16 bp, Artificial sequence
  Synthetic oligonucleotide
taccatgggcattctg

SEQ ID NO: 326 - DNA, 16 bp, Artificial sequence
  Synthetic oligonucleotide
aacaaggtttgagcga

SEQ ID NO: 327 - DNA, 16 bp, Artificial sequence
  Synthetic oligonucleotide
ggacaaagtcatgcgc

SEQ ID NO: 328 - DNA, 16 bp, Artificial sequence
  Synthetic oligonucleotide
tactagtctgtgagtc

SEQ ID NO: 329 - DNA, 16 bp, Artificial sequence
  Synthetic oligonucleotide
agccttgtggctaagt

SEQ ID NO: 330 - DNA, 16 bp, Artificial sequence
  Synthetic oligonucleotide
tccttttaggtctgtg

SEQ ID NO: 331 - DNA, 16 bp, Artificial sequence
  Synthetic oligonucleotide
ctatgatgttgggttg

SEQ ID NO: 332 - DNA, 16 bp, Artificial sequence
  Synthetic oligonucleotide
gctcactaagggtcag

SEQ ID NO: 333 - DNA, 16 bp, Artificial sequence
  Synthetic oligonucleotide
ccccatgagagtgatt

SEQ ID NO: 334 - DNA, 16 bp, Artificial sequence
  Synthetic oligonucleotide
cttaaccgtgataagc

SEQ ID NO: 335 - DNA, 16 bp, Artificial sequence
  Synthetic oligonucleotide
gtccaggatccttaat

SEQ ID NO: 336 - DNA, 16 bp, Artificial sequence
  Synthetic oligonucleotide
tgccgtgtgggattca

SEQ ID NO: 337 - DNA, 16 bp, Artificial sequence
  Synthetic oligonucleotide
cgccatggtaaaagga

SEQ ID NO: 338 - DNA, 16 bp, Artificial sequence
  Synthetic oligonucleotide
gctcagcggagtttct

SEQ ID NO: 339 - DNA, 16 bp, Artificial sequence
  Synthetic oligonucleotide
ggaggagcattctggc

SEQ ID NO: 340 - DNA, 16 bp, Artificial sequence
  Synthetic oligonucleotide
cccacgatccattggc

SEQ ID NO: 341 - DNA, 16 bp, Artificial sequence
  Synthetic oligonucleotide
tgaagatgatcgacag

SEQ ID NO: 342 - DNA, 16 bp, Artificial sequence
  Synthetic oligonucleotide
gtgtagatggccgcag

SEQ ID NO: 343 - DNA, 16 bp, Artificial sequence
  Synthetic oligonucleotide
ttgagatgccactccg

SEQ ID NO: 344 - DNA, 16 bp, Artificial sequence
  Synthetic oligonucleotide
tgacaccgctgagaag

SEQ ID NO: 345 - DNA, 16 bp, Artificial sequence
  Synthetic oligonucleotide
gattttgggctagctc

SEQ ID NO: 346 - DNA, 16 bp, Artificial sequence
  Synthetic oligonucleotide
ggctcaacacgaggct

SEQ ID NO: 347 - DNA, 16 bp, Artificial sequence
  Synthetic oligonucleotide
gagctggattatactg

SEQ ID NO: 348 - DNA, 16 bp, Artificial sequence
  Synthetic oligonucleotide
acccacactttggttt

SEQ ID NO: 349 - DNA, 16 bp, Artificial sequence
  Synthetic oligonucleotide
gggcagcggctgtttc

SEQ ID NO: 350 - DNA, 16 bp, Artificial sequence
  Synthetic oligonucleotide
ccgtgtttttgcaagg

SEQ ID NO: 351 - DNA, 16 bp, Artificial sequence
  Synthetic oligonucleotide
tccacctgtaagggca

SEQ ID NO: 352 - DNA, 16 bp, Artificial sequence
  Synthetic oligonucleotide
aaagacttgttgtcac

SEQ ID NO: 353 - DNA, 16 bp, Artificial sequence
  Synthetic oligonucleotide
tagctaggtacaaaag

SEQ ID NO: 354 - DNA, 16 bp, Artificial sequence
  Synthetic oligonucleotide
tctgatgctccgaccg

SEQ ID NO: 355 - DNA, 16 bp, Artificial sequence
  Synthetic oligonucleotide
gaacagcctagaccca

SEQ ID NO: 356 - DNA, 16 bp, Artificial sequence
  Synthetic oligonucleotide
ttagcatcagaagggc

SEQ ID NO: 357 - DNA, 16 bp, Artificial sequence
  Synthetic oligonucleotide
acacaaactcgggtgc

SEQ ID NO: 358 - DNA, 16 bp, Artificial sequence
  Synthetic oligonucleotide
gagtttccggccaaac

SEQ ID NO: 359 - DNA, 16 bp, Artificial sequence
  Synthetic oligonucleotide
cgagcgacggaggcgc

SEQ ID NO: 360 - DNA, 16 bp, Artificial sequence
  Synthetic oligonucleotide
ctgcctgcgaggagag

SEQ ID NO: 361 - DNA, 16 bp, Artificial sequence
  Synthetic oligonucleotide
gcccacgatccattgc

SEQ ID NO: 362 - DNA, 16 bp, Artificial sequence
  Synthetic oligonucleotide
taatcccggtaaccac

SEQ ID NO: 363 - DNA, 16 bp, Artificial sequence
  Synthetic oligonucleotide
caaggcaccccactaa

SEQ ID NO: 364 - DNA, 16 bp, Artificial sequence
  Synthetic oligonucleotide
gcatatctaactcagg

SEQ ID NO: 365 - DNA, 16 bp, Artificial sequence
  Synthetic oligonucleotide
gcccaactgagactcc

SEQ ID NO: 366 - DNA, 16 bp, Artificial sequence
  Synthetic oligonucleotide
atgtagctcagcggat

SEQ ID NO: 367 - DNA, 16 bp, Artificial sequence
  Synthetic oligonucleotide
cccttatccgctatcc

SEQ ID NO: 368 - DNA, 16 bp, Artificial sequence
  Synthetic oligonucleotide
ctggaccgaagggagt

SEQ ID NO: 369 - DNA, 16 bp, Artificial sequence
  Synthetic oligonucleotide
ggccactgcacgcttc

SEQ ID NO: 370 - DNA, 16 bp, Artificial sequence
  Synthetic oligonucleotide
tcataaatactcctct

SEQ ID NO: 371 - DNA, 16 bp, Artificial sequence
  Synthetic oligonucleotide
ctatagtagaaggagc

SEQ ID NO: 372 - DNA, 16 bp, Artificial sequence
  Synthetic oligonucleotide
caggagggcactaagg

SEQ ID NO: 373 - DNA, 16 bp, Artificial sequence
  Synthetic oligonucleotide
aaacagctcatcctgt

SEQ ID NO: 374 - DNA, 16 bp, Artificial sequence
  Synthetic oligonucleotide
ttgtactgtggttcaa

SEQ ID NO: 375 - DNA, 16 bp, Artificial sequence
  Synthetic oligonucleotide
ggtttaagcacaactt

SEQ ID NO: 376 - DNA, 16 bp, Artificial sequence
  Synthetic oligonucleotide
cctggaggattcgcca

SEQ ID NO: 377 - DNA, 16 bp, Artificial sequence
  Synthetic oligonucleotide
ggcggagtcaaagtca

SEQ ID NO: 378 - DNA, 16 bp, Artificial sequence
  Synthetic oligonucleotide
cctaatcctaaccaga

SEQ ID NO: 379 - DNA, 16 bp, Artificial sequence
  Synthetic oligonucleotide
cttatacctggagagg

SEQ ID NO: 380 - DNA, 16 bp, Artificial sequence
  Synthetic oligonucleotide
ggtgagacttaacaga

SEQ ID NO: 381 - DNA, 16 bp, Artificial sequence
  Synthetic oligonucleotide
tgattctacttacccc

SEQ ID NO: 382 - DNA, 16 bp, Artificial sequence
  Synthetic oligonucleotide
tcccaagccgcctgtg

SEQ ID NO: 383 - DNA, 16 bp, Artificial sequence
  Synthetic oligonucleotide
gagattatgggttggc

SEQ ID NO: 384 - DNA, 16 bp, Artificial sequence
  Synthetic oligonucleotide
ggacaggctcaataga

SEQ ID NO: 385 - DNA, 16 bp, Artificial sequence
  Synthetic oligonucleotide
cgtagagtcatctaga

SEQ ID NO: 386 - DNA, 16 bp, Artificial sequence
  Synthetic oligonucleotide
gcttatgcagctggga

SEQ ID NO: 387 - DNA, 16 bp, Artificial sequence
  Synthetic oligonucleotide
tgcaattctaccccat

SEQ ID NO: 388 - DNA, 16 bp, Artificial sequence
  Synthetic oligonucleotide
tggaagacttactcca

SEQ ID NO: 389 - DNA, 16 bp, Artificial sequence
  Synthetic oligonucleotide
ctcaacaggtaatcct

SEQ ID NO: 390 - DNA, 16 bp, Artificial sequence
  Synthetic oligonucleotide
tattaacacctcccat

SEQ ID NO: 391 - DNA, 16 bp, Artificial sequence
  Synthetic oligonucleotide
tggaagttttaagcca

SEQ ID NO: 392 - DNA, 16 bp, Artificial sequence
  Synthetic oligonucleotide
ggtcatacggtcttct

SEQ ID NO: 393 - DNA, 16 bp, Artificial sequence
  Synthetic oligonucleotide
ggaatagacaggtaac

SEQ ID NO: 394 - DNA, 16 bp, Artificial sequence
  Synthetic oligonucleotide
gagtaaggtgcacaca

SEQ ID NO: 395 - DNA, 16 bp, Artificial sequence
  Synthetic oligonucleotide
gagcaatgacagataa

SEQ ID NO: 396 - DNA, 16 bp, Artificial sequence
  Synthetic oligonucleotide
catgatctatgactga

SEQ ID NO: 397 - DNA, 16 bp, Artificial sequence
  Synthetic oligonucleotide
cggctaatgggttgtg

SEQ ID NO: 398 - DNA, 16 bp, Artificial sequence
  Synthetic oligonucleotide
ggttaactgttcctag

SEQ ID NO: 399 - DNA, 16 bp, Artificial sequence
  Synthetic oligonucleotide
gatcacgggaatggct

SEQ ID NO: 400 - DNA, 16 bp, Artificial sequence
  Synthetic oligonucleotide
gttgatacgcctggct

SEQ ID NO: 401 - DNA, 16 bp, Artificial sequence
  Synthetic oligonucleotide
acagtttaggcaggag

SEQ ID NO: 402 - DNA, 16 bp, Artificial sequence
  Synthetic oligonucleotide
aaatggtaccatgggc

SEQ ID NO: 403 - DNA, 16 bp, Artificial sequence
  Synthetic oligonucleotide
catcagatgggtaacg

SEQ ID NO: 404 - DNA, 16 bp, Artificial sequence
  Synthetic oligonucleotide
agctagatgtaaaggg

SEQ ID NO: 405 - DNA, 16 bp, Artificial sequence
  Synthetic oligonucleotide
tacttagctctctaat

SEQ ID NO: 406 - DNA, 16 bp, Artificial sequence
  Synthetic oligonucleotide
gaagagatagttccta

SEQ ID NO: 407 - DNA, 16 bp, Artificial sequence
  Synthetic oligonucleotide
ccacatggagcttgat

SEQ ID NO: 408 - DNA, 16 bp, Artificial sequence
  Synthetic oligonucleotide
gtgcagctatgatgtt

SEQ ID NO: 409 - DNA, 16 bp, Artificial sequence
  Synthetic oligonucleotide
ggctgattagctcact

SEQ ID NO: 410 - DNA, 16 bp, Artificial sequence
  Synthetic oligonucleotide
ctaaagcccttttgaa

SEQ ID NO: 411 - DNA, 16 bp, Artificial sequence
  Synthetic oligonucleotide
ctctaagcttaaccgt

SEQ ID NO: 412 - DNA, 16 bp, Artificial sequence
  Synthetic oligonucleotide
cagcagttttgatctg

SEQ ID NO: 413 - DNA, 16 bp, Artificial sequence
  Synthetic oligonucleotide
cagtatgccgtgtggg

SEQ ID NO: 414 - DNA, 16 bp, Artificial sequence
  Synthetic oligonucleotide
tattggagtcacgcca

SEQ ID NO: 415 - DNA, 16 bp, Artificial sequence
  Synthetic oligonucleotide
aatgcatcttagtcca

SEQ ID NO: 416 - DNA, 16 bp, Artificial sequence
  Synthetic oligonucleotide
tgctcagcggagtttc

SEQ ID NO: 417 - DNA, 16 bp, Artificial sequence
  Synthetic oligonucleotide
aggaggagcattctgg

SEQ ID NO: 418 - DNA, 16 bp, Artificial sequence
  Synthetic oligonucleotide
tgcccacgatccattg

SEQ ID NO: 419 - DNA, 16 bp, Artificial sequence
  Synthetic oligonucleotide
ctgaagatgatcgaca

SEQ ID NO: 420 - DNA, 16 bp, Artificial sequence
  Synthetic oligonucleotide
cgtgtagatggccgca

SEQ ID NO: 421 - DNA, 16 bp, Artificial sequence
  Synthetic oligonucleotide
cgagttgagatgccac

SEQ ID NO: 422 - DNA, 16 bp, Artificial sequence
  Synthetic oligonucleotide
acatagatgacaccgc

SEQ ID NO: 423 - DNA, 16 bp, Artificial sequence
  Synthetic oligonucleotide
ggattttgggctagct

SEQ ID NO: 424 - DNA, 16 bp, Artificial sequence
  Synthetic oligonucleotide
aaggctcaacacgagg

SEQ ID NO: 425 - DNA, 16 bp, Artificial sequence
  Synthetic oligonucleotide
ctgagctggattatac

SEQ ID NO: 426 - DNA, 16 bp, Artificial sequence
  Synthetic oligonucleotide
gtttctacccacactt

SEQ ID NO: 427 - DNA, 16 bp, Artificial sequence
  Synthetic oligonucleotide
cgggcagcggctgttt

SEQ ID NO: 428 - DNA, 16 bp, Artificial sequence
  Synthetic oligonucleotide
gccgtgtttttgcaag

SEQ ID NO: 429 - DNA, 16 bp, Artificial sequence
  Synthetic oligonucleotide
ctccacctgtaagggc

SEQ ID NO: 430 - DNA, 16 bp, Artificial sequence
  Synthetic oligonucleotide
caaagacttgttgtca

SEQ ID NO: 431 - DNA, 16 bp, Artificial sequence
  Synthetic oligonucleotide
ctagctaggtacaaaa

SEQ ID NO: 432 - DNA, 16 bp, Artificial sequence
  Synthetic oligonucleotide
gttctgatgctccgac

SEQ ID NO: 433 - DNA, 16 bp, Artificial sequence
  Synthetic oligonucleotide
agaacagcctagaccc

SEQ ID NO: 434 - DNA, 16 bp, Artificial sequence
  Synthetic oligonucleotide
aacacaaactcgggtg

SEQ ID NO: 435 - DNA, 16 bp, Artificial sequence
  Synthetic oligonucleotide
ccgagcgacggaggcg

SEQ ID NO: 436 - DNA, 16 bp, Artificial sequence
  Synthetic oligonucleotide
tctgcctgcgaggaga

SEQ ID NO: 437 - DNA, 16 bp, Artificial sequence
  Synthetic oligonucleotide
ttaatcccggtaacca

SEQ ID NO: 438 - DNA, 16 bp, Artificial sequence
  Synthetic oligonucleotide
cgtgctccaaggcacc

SEQ ID NO: 439 - DNA, 16 bp, Artificial sequence
  Synthetic oligonucleotide
acatactcaggactgt

SEQ ID NO: 440 - DNA, 16 bp, Artificial sequence
  Synthetic oligonucleotide
ggcagaggcgcgccca

SEQ ID NO: 441 - DNA, 16 bp, Artificial sequence
  Synthetic oligonucleotide
agccaaatgtagctca

SEQ ID NO: 442 - DNA, 16 bp, Artificial sequence
  Synthetic oligonucleotide
cgagaactgggccgcc

SEQ ID NO: 443 - DNA, 16 bp, Artificial sequence
  Synthetic oligonucleotide
ccaggacacgaacccc

SEQ ID NO: 444 - DNA, 16 bp, Artificial sequence
  Synthetic oligonucleotide
aacaagcggttcgcac

SEQ ID NO: 445 - DNA, 16 bp, Artificial sequence
  Synthetic oligonucleotide
tctgactatggtttgg

SEQ ID NO: 446 - DNA, 16 bp, Artificial sequence
  Synthetic oligonucleotide
cgattatgtgcagaga

SEQ ID NO: 447 - DNA, 16 bp, Artificial sequence
  Synthetic oligonucleotide
tcctaagtgatcagga

SEQ ID NO: 448 - DNA, 16 bp, Artificial sequence
  Synthetic oligonucleotide
tcgctatggcctaccc

SEQ ID NO: 449 - DNA, 16 bp, Artificial sequence
  Synthetic oligonucleotide
ccaataggactgggac

SEQ ID NO: 450 - DNA, 16 bp, Artificial sequence
  Synthetic oligonucleotide
tgtaacatgctacagg

SEQ ID NO: 451 - DNA, 16 bp, Artificial sequence
  Synthetic oligonucleotide
ctcaatcaaagaggcc

SEQ ID NO: 452 - DNA, 16 bp, Artificial sequence
  Synthetic oligonucleotide
aggcaggcggagtcaa

SEQ ID NO: 453 - DNA, 16 bp, Artificial sequence
  Synthetic oligonucleotide
tcttacttaagcccct

SEQ ID NO: 454 - DNA, 16 bp, Artificial sequence
  Synthetic oligonucleotide
agatatcccaagggaa

SEQ ID NO: 455 - DNA, 16 bp, Artificial sequence
  Synthetic oligonucleotide
tcccgaagtgggaagt

SEQ ID NO: 456 - DNA, 16 bp, Artificial sequence
  Synthetic oligonucleotide
gtgcacccaactcctt

SEQ ID NO: 457 - DNA, 16 bp, Artificial sequence
  Synthetic oligonucleotide
gggcaagccaggactg

SEQ ID NO: 458 - DNA, 16 bp, Artificial sequence
  Synthetic oligonucleotide
agccattccttgggta

SEQ ID NO: 459 - DNA, 16 bp, Artificial sequence
  Synthetic oligonucleotide
acataggacaggctca

SEQ ID NO: 460 - DNA, 16 bp, Artificial sequence
  Synthetic oligonucleotide
gctcaagcccaaaacg

SEQ ID NO: 461 - DNA, 16 bp, Artificial sequence
  Synthetic oligonucleotide
gccaaaccactgacca

SEQ ID NO: 462 - DNA, 16 bp, Artificial sequence
  Synthetic oligonucleotide
gcctactgcaattcta

SEQ ID NO: 463 - DNA, 16 bp, Artificial sequence
  Synthetic oligonucleotide
aagaattgctcttgga

SEQ ID NO: 464 - DNA, 16 bp, Artificial sequence
  Synthetic oligonucleotide
ggcgatgaaggtgacg

SEQ ID NO: 465 - DNA, 16 bp, Artificial sequence
  Synthetic oligonucleotide
agccatgagagggtaa

SEQ ID NO: 466 - DNA, 16 bp, Artificial sequence
  Synthetic oligonucleotide
tgcaaagtggaggcct

SEQ ID NO: 467 - DNA, 16 bp, Artificial sequence
  Synthetic oligonucleotide
ttgcaggtcatacggt

SEQ ID NO: 468 - DNA, 16 bp, Artificial sequence
  Synthetic oligonucleotide
ccccaatcagagccat

SEQ ID NO: 469 - DNA, 16 bp, Artificial sequence
  Synthetic oligonucleotide
ggacattgattgtagc

SEQ ID NO: 470 - DNA, 16 bp, Artificial sequence
  Synthetic oligonucleotide
tgcaactggaactgga

SEQ ID NO: 471 - DNA, 16 bp, Artificial sequence
  Synthetic oligonucleotide
gatctttacttctggt

SEQ ID NO: 472 - DNA, 16 bp, Artificial sequence
  Synthetic oligonucleotide
aaatgacggctaatgg

SEQ ID NO: 473 - DNA, 16 bp, Artificial sequence
  Synthetic oligonucleotide
agtactcacagctctg

SEQ ID NO: 474 - DNA, 16 bp, Artificial sequence
  Synthetic oligonucleotide
ggtaaagatcacggga

SEQ ID NO: 475 - DNA, 16 bp, Artificial sequence
  Synthetic oligonucleotide
ctgattatgtgtccag

SEQ ID NO: 476 - DNA, 16 bp, Artificial sequence
  Synthetic oligonucleotide
ctgcacactatgcata

SEQ ID NO: 477 - DNA, 16 bp, Artificial sequence
  Synthetic oligonucleotide
cgtcaaccttccaatg

SEQ ID NO: 478 - DNA, 16 bp, Artificial sequence
  Synthetic oligonucleotide
ataacgagcctgtaca

SEQ ID NO: 479 - DNA, 16 bp, Artificial sequence
  Synthetic oligonucleotide
gaccaacagataactg

SEQ ID NO: 480 - DNA, 16 bp, Artificial sequence
  Synthetic oligonucleotide
ccctaatctacttagc

SEQ ID NO: 481 - DNA, 16 bp, Artificial sequence
  Synthetic oligonucleotide
cctaatgcaatcaaga

SEQ ID NO: 482 - DNA, 16 bp, Artificial sequence
  Synthetic oligonucleotide
atctaatcatccaacc

SEQ ID NO: 483 - DNA, 16 bp, Artificial sequence
  Synthetic oligonucleotide
tggaaggtgcagctat

SEQ ID NO: 484 - DNA, 16 bp, Artificial sequence
  Synthetic oligonucleotide
ctcatataataggctg

SEQ ID NO: 485 - DNA, 16 bp, Artificial sequence
  Synthetic oligonucleotide
caggatgggtaggtct

SEQ ID NO: 486 - DNA, 16 bp, Artificial sequence
  Synthetic oligonucleotide
gtgcagcgactaacta

SEQ ID NO: 487 - DNA, 16 bp, Artificial sequence
  Synthetic oligonucleotide
cattgcgggttaattg

SEQ ID NO: 488 - DNA, 16 bp, Artificial sequence
  Synthetic oligonucleotide
tcaaactgatggcccc

SEQ ID NO: 489 - DNA, 16 bp, Artificial sequence
  Synthetic oligonucleotide
agccaatggaagtgaa

SEQ ID NO: 490 - DNA, 16 bp, Artificial sequence
  Synthetic oligonucleotide
cagaacagcctagacc

SEQ ID NO: 491 - DNA, 16 bp, Artificial sequence
  Synthetic oligonucleotide
ctgctcagcggagttt

SEQ ID NO: 492 - DNA, 16 bp, Artificial sequence
  Synthetic oligonucleotide
acaggaggagcattct

SEQ ID NO: 493 - DNA, 16 bp, Artificial sequence
  Synthetic oligonucleotide
attgcccacgatccat

SEQ ID NO: 494 - DNA, 16 bp, Artificial sequence
  Synthetic oligonucleotide
tgctgaagatgatcga

SEQ ID NO: 495 - DNA, 16 bp, Artificial sequence
  Synthetic oligonucleotide
ccgtgtagatggccgc

SEQ ID NO: 496 - DNA, 16 bp, Artificial sequence
  Synthetic oligonucleotide
ccgagttgagatgcca

SEQ ID NO: 497 - DNA, 16 bp, Artificial sequence
  Synthetic oligonucleotide
cacatagatgacaccg

SEQ ID NO: 498 - DNA, 16 bp, Artificial sequence
  Synthetic oligonucleotide
aatcaacagcaacccc

SEQ ID NO: 499 - DNA, 16 bp, Artificial sequence
  Synthetic oligonucleotide
taaggctcaacacgag

SEQ ID NO: 500 - DNA, 16 bp, Artificial sequence
  Synthetic oligonucleotide
tactgagctggattat

SEQ ID NO: 501 - DNA, 16 bp, Artificial sequence
  Synthetic oligonucleotide
ggtttctacccacact

SEQ ID NO: 502 - DNA, 16 bp, Artificial sequence
  Synthetic oligonucleotide
tcgggcagcggctgtt

SEQ ID NO: 503 - DNA, 16 bp, Artificial sequence
  Synthetic oligonucleotide
agccgtgtttttgcaa

SEQ ID NO: 504 - DNA, 16 bp, Artificial sequence
  Synthetic oligonucleotide
atactccacctgtaag

SEQ ID NO: 505 - DNA, 16 bp, Artificial sequence
  Synthetic oligonucleotide
tcaaagacttgttgtc

SEQ ID NO: 506 - DNA, 16 bp, Artificial sequence
  Synthetic oligonucleotide
cctagctaggtacaaa

SEQ ID NO: 507 - DNA, 16 bp, Artificial sequence
  Synthetic oligonucleotide
tgttctgatgctccga

SEQ ID NO: 508 - DNA, 16 bp, Artificial sequence
  Synthetic oligonucleotide
ccctttaacgggaaca

SEQ ID NO: 509 - DNA, 16 bp, Artificial sequence
  Synthetic oligonucleotide
caaacacaaactcggg

SEQ ID NO: 510 - DNA, 16 bp, Artificial sequence
  Synthetic oligonucleotide
gccgagcgacggaggc

SEQ ID NO: 511 - DNA, 16 bp, Artificial sequence
  Synthetic oligonucleotide
tttctgcctgcgagga

SEQ ID NO: 512 - DNA, 16 bp, Artificial sequence
  Synthetic oligonucleotide
cttaatcccggtaacc

SEQ ID NO: 513 - DNA, 16 bp, Artificial sequence
  Synthetic oligonucleotide
gggcctgatcatagtt

SEQ ID NO: 514 - DNA, 16 bp, Artificial sequence
  Synthetic oligonucleotide
accaacacttatgtga

SEQ ID NO: 515 - DNA, 16 bp, Artificial sequence
  Synthetic oligonucleotide
attcatagcctcctaa

SEQ ID NO: 516 - DNA, 16 bp, Artificial sequence
  Synthetic oligonucleotide
cttcagcaaggcgaga

SEQ ID NO: 517 - DNA, 16 bp, Artificial sequence
  Synthetic oligonucleotide
tgctcttgcgctagac

SEQ ID NO: 518 - DNA, 16 bp, Artificial sequence
  Synthetic oligonucleotide
cggaacatcttttgct

SEQ ID NO: 519 - DNA, 16 bp, Artificial sequence
  Synthetic oligonucleotide
attcacccatctgact

SEQ ID NO: 520 - DNA, 16 bp, Artificial sequence
  Synthetic oligonucleotide
gcacacagaaacgatt

SEQ ID NO: 521 - DNA, 16 bp, Artificial sequence
  Synthetic oligonucleotide
tcccaggtcgatattt

SEQ ID NO: 522 - DNA, 16 bp, Artificial sequence
  Synthetic oligonucleotide
atcaatcgctatggcc

SEQ ID NO: 523 - DNA, 16 bp, Artificial sequence
  Synthetic oligonucleotide
gattaagcactgttct

SEQ ID NO: 524 - DNA, 16 bp, Artificial sequence
  Synthetic oligonucleotide
tccaacggcagaagac

SEQ ID NO: 525 - DNA, 16 bp, Artificial sequence
  Synthetic oligonucleotide
agcttattgtctgcag

SEQ ID NO: 526 - DNA, 16 bp, Artificial sequence
  Synthetic oligonucleotide
cgagaaggcaggcgga

SEQ ID NO: 527 - DNA, 16 bp, Artificial sequence
  Synthetic oligonucleotide
ggctacctacttccag

SEQ ID NO: 528 - DNA, 16 bp, Artificial sequence
  Synthetic oligonucleotide
ctctagatgtttggct

SEQ ID NO: 529 - DNA, 16 bp, Artificial sequence
  Synthetic oligonucleotide
gaaatagtcctgcatg

SEQ ID NO: 530 - DNA, 16 bp, Artificial sequence
  Synthetic oligonucleotide
ggtctaaggaaatcac

SEQ ID NO: 531 - DNA, 16 bp, Artificial sequence
  Synthetic oligonucleotide
gactttgtgagcaggg

SEQ ID NO: 532 - DNA, 16 bp, Artificial sequence
  Synthetic oligonucleotide
tctcataagagcctgt

SEQ ID NO: 533 - DNA, 16 bp, Artificial sequence
  Synthetic oligonucleotide
ctccaactccttgtga

SEQ ID NO: 534 - DNA, 16 bp, Artificial sequence
  Synthetic oligonucleotide
ttacacaccagttgct

SEQ ID NO: 535 - DNA, 16 bp, Artificial sequence
  Synthetic oligonucleotide
gcaaagagagagcggc

SEQ ID NO: 536 - DNA, 16 bp, Artificial sequence
  Synthetic oligonucleotide
ccgtttacaagcacaa

SEQ ID NO: 537 - DNA, 16 bp, Artificial sequence
  Synthetic oligonucleotide
gagtaggctttgtttc

SEQ ID NO: 538 - DNA, 16 bp, Artificial sequence
  Synthetic oligonucleotide
gctcacaaaggcgatg

SEQ ID NO: 539 - DNA, 16 bp, Artificial sequence
  Synthetic oligonucleotide
ccccatatcaagtccc

SEQ ID NO: 540 - DNA, 16 bp, Artificial sequence
  Synthetic oligonucleotide
agaacttatgttgagt

SEQ ID NO: 541 - DNA, 16 bp, Artificial sequence
  Synthetic oligonucleotide
ctgcacagatagcaaa

SEQ ID NO: 542 - DNA, 16 bp, Artificial sequence
  Synthetic oligonucleotide
tcagatgatgctgctc

SEQ ID NO: 543 - DNA, 16 bp, Artificial sequence
  Synthetic oligonucleotide
tctactatatcctgga

SEQ ID NO: 544 - DNA, 16 bp, Artificial sequence
  Synthetic oligonucleotide
ccatattgcaactgga

SEQ ID NO: 545 - DNA, 16 bp, Artificial sequence
  Synthetic oligonucleotide
ggccagagagttgttt

SEQ ID NO: 546 - DNA, 16 bp, Artificial sequence
  Synthetic oligonucleotide
gtaagaaaatgacggc

SEQ ID NO: 547 - DNA, 16 bp, Artificial sequence
  Synthetic oligonucleotide
ttcaatgcttcaccca

SEQ ID NO: 548 - DNA, 16 bp, Artificial sequence
  Synthetic oligonucleotide
gggcttatcagaactt

SEQ ID NO: 549 - DNA, 16 bp, Artificial sequence
  Synthetic oligonucleotide
cctcagtattcacctc

SEQ ID NO: 550 - DNA, 16 bp, Artificial sequence
  Synthetic oligonucleotide
gaagatgtcaccctgt

SEQ ID NO: 551 - DNA, 16 bp, Artificial sequence
  Synthetic oligonucleotide
tacaaccctatttacg

SEQ ID NO: 552 - DNA, 16 bp, Artificial sequence
  Synthetic oligonucleotide
catttatcctctggtg

SEQ ID NO: 553 - DNA, 16 bp, Artificial sequence
  Synthetic oligonucleotide
tgctattacagctcag

SEQ ID NO: 554 - DNA, 16 bp, Artificial sequence
  Synthetic oligonucleotide
caacaaccctaatcta

SEQ ID NO: 555 - DNA, 16 bp, Artificial sequence
  Synthetic oligonucleotide
agccaacctaatgcaa

SEQ ID NO: 556 - DNA, 16 bp, Artificial sequence
  Synthetic oligonucleotide
tgccgaggaaacacaa

SEQ ID NO: 557 - DNA, 16 bp, Artificial sequence
  Synthetic oligonucleotide
ggaaagggatgtcagt

SEQ ID NO: 558 - DNA, 16 bp, Artificial sequence
  Synthetic oligonucleotide
acggactctcatataa

SEQ ID NO: 559 - DNA, 16 bp, Artificial sequence
  Synthetic oligonucleotide
tgctgagcattcaact

SEQ ID NO: 560 - DNA, 16 bp, Artificial sequence
  Synthetic oligonucleotide
gagaagtgcagcgact

SEQ ID NO: 561 - DNA, 16 bp, Artificial sequence
  Synthetic oligonucleotide
gcgaaatcattgcggg

SEQ ID NO: 562 - DNA, 16 bp, Artificial sequence
  Synthetic oligonucleotide
gagcagccacgctcaa

SEQ ID NO: 563 - DNA, 16 bp, Artificial sequence
  Synthetic oligonucleotide
ggcattacctaaagcc

SEQ ID NO: 564 - DNA, 16 bp, Artificial sequence
  Synthetic oligonucleotide
gaccgagaaactggct

SEQ ID NO: 565 - DNA, 16 bp, Artificial sequence
  Synthetic oligonucleotide
accgtgtagatggccg

SEQ ID NO: 566 - DNA, 16 bp, Artificial sequence
  Synthetic oligonucleotide
ttagtgataataagga

SEQ ID NO: 567 - DNA, 16 bp, Artificial sequence
  Synthetic oligonucleotide
tctgctcagcggagtt

SEQ ID NO: 568 - DNA, 16 bp, Artificial sequence
  Synthetic oligonucleotide
aacaggaggagcattc

SEQ ID NO: 569 - DNA, 16 bp, Artificial sequence
  Synthetic oligonucleotide
cattgcccacgatcca

SEQ ID NO: 570 - DNA, 16 bp, Artificial sequence
  Synthetic oligonucleotide
agggtgaagagttggc

SEQ ID NO: 571 - DNA, 16 bp, Artificial sequence
  Synthetic oligonucleotide
aatccgagttgagatg

SEQ ID NO: 572 - DNA, 16 bp, Artificial sequence
  Synthetic oligonucleotide
ccgcaagatcacatag

SEQ ID NO: 573 - DNA, 16 bp, Artificial sequence
  Synthetic oligonucleotide
ccggagatattatata

SEQ ID NO: 574 - DNA, 16 bp, Artificial sequence
  Synthetic oligonucleotide
ttaaggctcaacacga

SEQ ID NO: 575 - DNA, 16 bp, Artificial sequence
  Synthetic oligonucleotide
atactgagctggatta

SEQ ID NO: 576 - DNA, 16 bp, Artificial sequence
  Synthetic oligonucleotide
gggcttttggacattt

SEQ ID NO: 577 - DNA, 16 bp, Artificial sequence
  Synthetic oligonucleotide
ttcgggcagcggctgt

SEQ ID NO: 578 - DNA, 16 bp, Artificial sequence
  Synthetic oligonucleotide
caagccgtgtttttgc

SEQ ID NO: 579 - DNA, 16 bp, Artificial sequence
  Synthetic oligonucleotide
gaagatactccacctg

SEQ ID NO: 580 - DNA, 16 bp, Artificial sequence
  Synthetic oligonucleotide
agcctagctaggtaca

SEQ ID NO: 581 - DNA, 16 bp, Artificial sequence
  Synthetic oligonucleotide
ttgttctgatgctccg

SEQ ID NO: 582 - DNA, 16 bp, Artificial sequence
  Synthetic oligonucleotide
tgccagacagtccttg

SEQ ID NO: 583 - DNA, 16 bp, Artificial sequence
  Synthetic oligonucleotide
gttcccctttaacggg

SEQ ID NO: 584 - DNA, 16 bp, Artificial sequence
  Synthetic oligonucleotide
cgatcctcagggtggc

SEQ ID NO: 585 - DNA, 16 bp, Artificial sequence
  Synthetic oligonucleotide
gggccgagcgacggag

SEQ ID NO: 586 - DNA, 16 bp, Artificial sequence
  Synthetic oligonucleotide
gagtttctgcctgcga

SEQ ID NO: 587 - DNA, 16 bp, Artificial sequence
  Synthetic oligonucleotide
tcttaatcccggtaac

SEQ ID NO: 588 - DNA, 16 bp, Artificial sequence
  Synthetic oligonucleotide
actcacccggccaaac

SEQ ID NO: 589 - DNA, 16 bp, Artificial sequence
  Synthetic oligonucleotide
gttagatttgctctag

SEQ ID NO: 590 - DNA, 16 bp, Artificial sequence
  Synthetic oligonucleotide
tgcgaggtggccattt

SEQ ID NO: 591 - DNA, 16 bp, Artificial sequence
  Synthetic oligonucleotide
gacctagtgttgaccg

SEQ ID NO: 592 - DNA, 16 bp, Artificial sequence
  Synthetic oligonucleotide
cgccacagggactgtt

SEQ ID NO: 593 - DNA, 16 bp, Artificial sequence
  Synthetic oligonucleotide
gggcattctgctcttg

SEQ ID NO: 594 - DNA, 16 bp, Artificial sequence
  Synthetic oligonucleotide
gcctgcaacggaacat

SEQ ID NO: 595 - DNA, 16 bp, Artificial sequence
  Synthetic oligonucleotide
gtcctaaaagggtgtt

SEQ ID NO: 596 - DNA, 16 bp, Artificial sequence
  Synthetic oligonucleotide
ctgcatggtaagagcc

SEQ ID NO: 597 - DNA, 16 bp, Artificial sequence
  Synthetic oligonucleotide
tatcataccaccttca

SEQ ID NO: 598 - DNA, 16 bp, Artificial sequence
  Synthetic oligonucleotide
ggctcttaacatcaat

SEQ ID NO: 599 - DNA, 16 bp, Artificial sequence
  Synthetic oligonucleotide
caccatgcaaacccac

SEQ ID NO: 600 - DNA, 16 bp, Artificial sequence
  Synthetic oligonucleotide
gctatttccaacggca

SEQ ID NO: 601 - DNA, 16 bp, Artificial sequence
  Synthetic oligonucleotide
gagcatagttcatttg

SEQ ID NO: 602 - DNA, 16 bp, Artificial sequence
  Synthetic oligonucleotide
gcccacacgaggcaga

SEQ ID NO: 603 - DNA, 16 bp, Artificial sequence
  Synthetic oligonucleotide
tagaaagtgtctgcat

SEQ ID NO: 604 - DNA, 16 bp, Artificial sequence
  Synthetic oligonucleotide
gtcaaggcagactcta

SEQ ID NO: 605 - DNA, 16 bp, Artificial sequence
  Synthetic oligonucleotide
acgagagttgttcaag

SEQ ID NO: 606 - DNA, 16 bp, Artificial sequence
  Synthetic oligonucleotide
acccgtggaagacagc

SEQ ID NO: 607 - DNA, 16 bp, Artificial sequence
  Synthetic oligonucleotide
gcctaacacctcagca

SEQ ID NO: 608 - DNA, 16 bp, Artificial sequence
  Synthetic oligonucleotide
taccaccagggtctca

SEQ ID NO: 609 - DNA, 16 bp, Artificial sequence
  Synthetic oligonucleotide
ttccactacccatagt

SEQ ID NO: 610 - DNA, 16 bp, Artificial sequence
  Synthetic oligonucleotide
ccgcaaatcttctgtt

SEQ ID NO: 611 - DNA, 16 bp, Artificial sequence
  Synthetic oligonucleotide
gagaatggtgtggcaa

SEQ ID NO: 612 - DNA, 16 bp, Artificial sequence
  Synthetic oligonucleotide
gtaaaccaatgcccgt

SEQ ID NO: 613 - DNA, 16 bp, Artificial sequence
  Synthetic oligonucleotide
tttatacccttgttgg

SEQ ID NO: 614 - DNA, 16 bp, Artificial sequence
  Synthetic oligonucleotide
agacaactatgtgcca

SEQ ID NO: 615 - DNA, 16 bp, Artificial sequence
  Synthetic oligonucleotide
agtgagttaagggctc

SEQ ID NO: 616 - DNA, 16 bp, Artificial sequence
  Synthetic oligonucleotide
tagaacttatgttgag

SEQ ID NO: 617 - DNA, 16 bp, Artificial sequence
  Synthetic oligonucleotide
cagcataagggtgcta

SEQ ID NO: 618 - DNA, 16 bp, Artificial sequence
  Synthetic oligonucleotide
gctcaaagggaacccc

SEQ ID NO: 619 - DNA, 16 bp, Artificial sequence
  Synthetic oligonucleotide
tgtgttcaagtgctta

SEQ ID NO: 620 - DNA, 16 bp, Artificial sequence
  Synthetic oligonucleotide
cctaatccatattgca

SEQ ID NO: 621 - DNA, 16 bp, Artificial sequence
  Synthetic oligonucleotide
aggataaaagtggcca

SEQ ID NO: 622 - DNA, 16 bp, Artificial sequence
  Synthetic oligonucleotide
gcacaacatatgcttc

SEQ ID NO: 623 - DNA, 16 bp, Artificial sequence
  Synthetic oligonucleotide
aagcataccttcaatg

SEQ ID NO: 624 - DNA, 16 bp, Artificial sequence
  Synthetic oligonucleotide
ttgaagggcttatcag

SEQ ID NO: 625 - DNA, 16 bp, Artificial sequence
  Synthetic oligonucleotide
acagatagcctcagta

SEQ ID NO: 626 - DNA, 16 bp, Artificial sequence
  Synthetic oligonucleotide
tgctaggcagaatcca

SEQ ID NO: 627 - DNA, 16 bp, Artificial sequence
  Synthetic oligonucleotide
catctaaccttgggct

SEQ ID NO: 628 - DNA, 16 bp, Artificial sequence
  Synthetic oligonucleotide
cactcaaccgtccctg

SEQ ID NO: 629 - DNA, 16 bp, Artificial sequence
  Synthetic oligonucleotide
ggacactctcaggact

SEQ ID NO: 630 - DNA, 16 bp, Artificial sequence
  Synthetic oligonucleotide
gttaagttgtcacttg

SEQ ID NO: 631 - DNA, 16 bp, Artificial sequence
  Synthetic oligonucleotide
agccttttgatatgca

SEQ ID NO: 632 - DNA, 16 bp, Artificial sequence
  Synthetic oligonucleotide
tttgattctgccgagg

SEQ ID NO: 633 - DNA, 16 bp, Artificial sequence
  Synthetic oligonucleotide
tcgcaaaagcactttc

SEQ ID NO: 634 - DNA, 16 bp, Artificial sequence
  Synthetic oligonucleotide
gccacacggactctca

SEQ ID NO: 635 - DNA, 16 bp, Artificial sequence
  Synthetic oligonucleotide
gtccagacaatacaaa

SEQ ID NO: 636 - DNA, 16 bp, Artificial sequence
  Synthetic oligonucleotide
gtatagagaagtgcag

SEQ ID NO: 637 - DNA, 16 bp, Artificial sequence
  Synthetic oligonucleotide
gtcaggagcgaaatca

SEQ ID NO: 638 - DNA, 16 bp, Artificial sequence
  Synthetic oligonucleotide
gcccaccaatgcagcc

SEQ ID NO: 639 - DNA, 16 bp, Artificial sequence
  Synthetic oligonucleotide
agtgagtggtggcatt

SEQ ID NO: 640 - DNA, 16 bp, Artificial sequence
  Synthetic oligonucleotide
gttctgctcagcggag

SEQ ID NO: 641 - DNA, 16 bp, Artificial sequence
  Synthetic oligonucleotide
atactcagcaacagga

SEQ ID NO: 642 - DNA, 16 bp, Artificial sequence
  Synthetic oligonucleotide
tccattgcccacgatc

SEQ ID NO: 643 - DNA, 16 bp, Artificial sequence
  Synthetic oligonucleotide
cccccttggtgagggt

SEQ ID NO: 644 - DNA, 16 bp, Artificial sequence
  Synthetic oligonucleotide
tcaccgtgtagatggc

SEQ ID NO: 645 - DNA, 16 bp, Artificial sequence
  Synthetic oligonucleotide
taatccgagttgagat

SEQ ID NO: 646 - DNA, 16 bp, Artificial sequence
  Synthetic oligonucleotide
tccgcaagatcacata

SEQ ID NO: 647 - DNA, 16 bp, Artificial sequence
  Synthetic oligonucleotide
accggagatattatat

SEQ ID NO: 648 - DNA, 16 bp, Artificial sequence
  Synthetic oligonucleotide
tttaaggctcaacacg

SEQ ID NO: 649 - DNA, 16 bp, Artificial sequence
  Synthetic oligonucleotide
aaatactgagctggat

SEQ ID NO: 650 - DNA, 16 bp, Artificial sequence
  Synthetic oligonucleotide
agggcttttggacatt

SEQ ID NO: 651 - DNA, 16 bp, Artificial sequence
  Synthetic oligonucleotide
ggttcgggcagcggct

SEQ ID NO: 652 - DNA, 16 bp, Artificial sequence
  Synthetic oligonucleotide
acaagccgtgtttttg

SEQ ID NO: 653 - DNA, 16 bp, Artificial sequence
  Synthetic oligonucleotide
cgaagatactccacct

SEQ ID NO: 654 - DNA, 16 bp, Artificial sequence
  Synthetic oligonucleotide
tttagatgattagtga

SEQ ID NO: 655 - DNA, 16 bp, Artificial sequence
  Synthetic oligonucleotide
cagcctagctaggtac

SEQ ID NO: 656 - DNA, 16 bp, Artificial sequence
  Synthetic oligonucleotide
cgcttgttctgatgct

SEQ ID NO: 657 - DNA, 16 bp, Artificial sequence
  Synthetic oligonucleotide
ttgccagacagtcctt

SEQ ID NO: 658 - DNA, 16 bp, Artificial sequence
  Synthetic oligonucleotide
cgcgcgcgaagcaagg

SEQ ID NO: 659 - DNA, 16 bp, Artificial sequence
  Synthetic oligonucleotide
ccgatcctcagggtgg

SEQ ID NO: 660 - DNA, 16 bp, Artificial sequence
  Synthetic oligonucleotide
tgggccgagcgacgga

SEQ ID NO: 661 - DNA, 16 bp, Artificial sequence
  Synthetic oligonucleotide
cggagtttctgcctgc

SEQ ID NO: 662 - DNA, 16 bp, Artificial sequence
  Synthetic oligonucleotide
ttcttaatcccggtaa

SEQ ID NO: 663 - DNA, 16 bp, Artificial sequence
  Synthetic oligonucleotide
agcataggcacacatc

SEQ ID NO: 664 - DNA, 16 bp, Artificial sequence
  Synthetic oligonucleotide
ctctgataggtaggta

SEQ ID NO: 665 - DNA, 16 bp, Artificial sequence
  Synthetic oligonucleotide
ggcgggtgcgaggtgg

SEQ ID NO: 666 - DNA, 16 bp, Artificial sequence
  Synthetic oligonucleotide
ggcggctgagctttct

SEQ ID NO: 667 - DNA, 16 bp, Artificial sequence
  Synthetic oligonucleotide
gtccaacactctcggg

SEQ ID NO: 668 - DNA, 16 bp, Artificial sequence
  Synthetic oligonucleotide
gtccaccgcgcgcttc

SEQ ID NO: 669 - DNA, 16 bp, Artificial sequence
  Synthetic oligonucleotide
agccttcgcgccgcct

SEQ ID NO: 670 - DNA, 16 bp, Artificial sequence
  Synthetic oligonucleotide
gccgacatgggacctg

SEQ ID NO: 671 - DNA, 16 bp, Artificial sequence
  Synthetic oligonucleotide
cacctagccacaccgc

SEQ ID NO: 672 - DNA, 16 bp, Artificial sequence
  Synthetic oligonucleotide
gcttagctatcatacc

SEQ ID NO: 673 - DNA, 16 bp, Artificial sequence
  Synthetic oligonucleotide
gtccacgggctcttaa

SEQ ID NO: 674 - DNA, 16 bp, Artificial sequence
  Synthetic oligonucleotide
cagtgctacggtcaca

SEQ ID NO: 675 - DNA, 16 bp, Artificial sequence
  Synthetic oligonucleotide
caccaactgacagcta

SEQ ID NO: 676 - DNA, 16 bp, Artificial sequence
  Synthetic oligonucleotide
tcgcaatgagcatagt

SEQ ID NO: 677 - DNA, 16 bp, Artificial sequence
  Synthetic oligonucleotide
cactaagcctctctta

SEQ ID NO: 678 - DNA, 16 bp, Artificial sequence
  Synthetic oligonucleotide
gaatcatggatgagat

SEQ ID NO: 679 - DNA, 16 bp, Artificial sequence
  Synthetic oligonucleotide
cgtcaagtcaaggcag

SEQ ID NO: 680 - DNA, 16 bp, Artificial sequence
  Synthetic oligonucleotide
ggtacacgagagttgt

SEQ ID NO: 681 - DNA, 16 bp, Artificial sequence
  Synthetic oligonucleotide
actgagaaacccgtgg

SEQ ID NO: 682 - DNA, 16 bp, Artificial sequence
  Synthetic oligonucleotide
tgctttggtgttgagc

SEQ ID NO: 683 - DNA, 16 bp, Artificial sequence
  Synthetic oligonucleotide
acacattccgtcctct

SEQ ID NO: 684 - DNA, 16 bp, Artificial sequence
  Synthetic oligonucleotide
tgcagagcatgttcca

SEQ ID NO: 685 - DNA, 16 bp, Artificial sequence
  Synthetic oligonucleotide
caccttcccgcaaatc

SEQ ID NO: 686 - DNA, 16 bp, Artificial sequence
  Synthetic oligonucleotide
aaactagagagggtgg

SEQ ID NO: 687 - DNA, 16 bp, Artificial sequence
  Synthetic oligonucleotide
ccccaccagtgacagt

SEQ ID NO: 688 - DNA, 16 bp, Artificial sequence
  Synthetic oligonucleotide
tagtaagctgtctgag

SEQ ID NO: 689 - DNA, 16 bp, Artificial sequence
  Synthetic oligonucleotide
tgcggaaagcaaaaca

SEQ ID NO: 690 - DNA, 16 bp, Artificial sequence
  Synthetic oligonucleotide
gcctacaacctagtga

SEQ ID NO: 691 - DNA, 16 bp, Artificial sequence
  Synthetic oligonucleotide
gtagaacttatgttga

SEQ ID NO: 692 - DNA, 16 bp, Artificial sequence
  Synthetic oligonucleotide
gattcaagagctctcg

SEQ ID NO: 693 - DNA, 16 bp, Artificial sequence
  Synthetic oligonucleotide
gacactatatgtgttc

SEQ ID NO: 694 - DNA, 16 bp, Artificial sequence
  Synthetic oligonucleotide
ctggatagaaacactc

SEQ ID NO: 695 - DNA, 16 bp, Artificial sequence
  Synthetic oligonucleotide
aatagaacttatgttg

SEQ ID NO: 696 - DNA, 16 bp, Artificial sequence
  Synthetic oligonucleotide
gtctagcactcttcac

SEQ ID NO: 697 - DNA, 16 bp, Artificial sequence
  Synthetic oligonucleotide
gccatatgtaatggct

SEQ ID NO: 698 - DNA, 16 bp, Artificial sequence
  Synthetic oligonucleotide
gcctactaccttccct

SEQ ID NO: 699 - DNA, 16 bp, Artificial sequence
  Synthetic oligonucleotide
tgctctacagatagcc

SEQ ID NO: 700 - DNA, 16 bp, Artificial sequence
  Synthetic oligonucleotide
atgctaggcagaatcc

SEQ ID NO: 701 - DNA, 16 bp, Artificial sequence
  Synthetic oligonucleotide
accaacatctaacctt

SEQ ID NO: 702 - DNA, 16 bp, Artificial sequence
  Synthetic oligonucleotide
attcagtgtaacactc

SEQ ID NO: 703 - DNA, 16 bp, Artificial sequence
  Synthetic oligonucleotide
ggacaggacactctca

SEQ ID NO: 704 - DNA, 16 bp, Artificial sequence
  Synthetic oligonucleotide
tcacatcccatgagtg

SEQ ID NO: 705 - DNA, 16 bp, Artificial sequence
  Synthetic oligonucleotide
agctcaggttgaaagc

SEQ ID NO: 706 - DNA, 16 bp, Artificial sequence
  Synthetic oligonucleotide
tattaatcccccccca

SEQ ID NO: 707 - DNA, 16 bp, Artificial sequence
  Synthetic oligonucleotide
ggtaacctcgcaaaag

SEQ ID NO: 708 - DNA, 16 bp, Artificial sequence
  Synthetic oligonucleotide
gtccaaactggagaac

SEQ ID NO: 709 - DNA, 16 bp, Artificial sequence
  Synthetic oligonucleotide
ggtcatctttaagcag

SEQ ID NO: 710 - DNA, 16 bp, Artificial sequence
  Synthetic oligonucleotide
tccttgaacaagaggg

SEQ ID NO: 711 - DNA, 16 bp, Artificial sequence
  Synthetic oligonucleotide
ggccatgtcaggagcg

SEQ ID NO: 712 - DNA, 16 bp, Artificial sequence
  Synthetic oligonucleotide
ggatatgcaggtgggt

SEQ ID NO: 713 - DNA, 16 bp, Artificial sequence
  Synthetic oligonucleotide
ctatatgccactctac

SEQ ID NO: 714 - DNA, 16 bp, Artificial sequence
  Synthetic oligonucleotide
atcaattcatatctcc

SEQ ID NO: 715 - DNA, 16 bp, Artificial sequence
  Synthetic oligonucleotide
agttctgctcagcgga

SEQ ID NO: 716 - DNA, 16 bp, Artificial sequence
  Synthetic oligonucleotide
tgatactcagcaacag

SEQ ID NO: 717 - DNA, 16 bp, Artificial sequence
  Synthetic oligonucleotide
gccagagatcagttgc

SEQ ID NO: 718 - DNA, 16 bp, Artificial sequence
  Synthetic oligonucleotide
gccccccttggtgagg

SEQ ID NO: 719 - DNA, 16 bp, Artificial sequence
  Synthetic oligonucleotide
ctcaccgtgtagatgg

SEQ ID NO: 720 - DNA, 16 bp, Artificial sequence
  Synthetic oligonucleotide
gtaatccgagttgaga

SEQ ID NO: 721 - DNA, 16 bp, Artificial sequence
  Synthetic oligonucleotide
ttccgcaagatcacat

SEQ ID NO: 722 - DNA, 16 bp, Artificial sequence
  Synthetic oligonucleotide
aaaccggagatattat

SEQ ID NO: 723 - DNA, 16 bp, Artificial sequence
  Synthetic oligonucleotide
ctacttctttaaggct

SEQ ID NO: 724 - DNA, 16 bp, Artificial sequence
  Synthetic oligonucleotide
gatggagttatcttat

SEQ ID NO: 725 - DNA, 16 bp, Artificial sequence
  Synthetic oligonucleotide
aagggcttttggacat

SEQ ID NO: 726 - DNA, 16 bp, Artificial sequence
  Synthetic oligonucleotide
aggttcgggcagcggc

SEQ ID NO: 727 - DNA, 16 bp, Artificial sequence
  Synthetic oligonucleotide
ccacaagccgtgtttt

SEQ ID NO: 728 - DNA, 16 bp, Artificial sequence
  Synthetic oligonucleotide
acgaagatactccacc

SEQ ID NO: 729 - DNA, 16 bp, Artificial sequence
  Synthetic oligonucleotide
tgtttagatgattagt

SEQ ID NO: 730 - DNA, 16 bp, Artificial sequence
  Synthetic oligonucleotide
gcagcctagctaggta

SEQ ID NO: 731 - DNA, 16 bp, Artificial sequence
  Synthetic oligonucleotide
acgcttgttctgatgc

SEQ ID NO: 732 - DNA, 16 bp, Artificial sequence
  Synthetic oligonucleotide
attgccagacagtcct

SEQ ID NO: 733 - DNA, 16 bp, Artificial sequence
  Synthetic oligonucleotide
gcgcgcgcgaagcaag

SEQ ID NO: 734 - DNA, 16 bp, Artificial sequence
  Synthetic oligonucleotide
cccgatcctcagggtg

SEQ ID NO: 735 - DNA, 16 bp, Artificial sequence
  Synthetic oligonucleotide
ctgggccgagcgacgg

SEQ ID NO: 736 - DNA, 16 bp, Artificial sequence
  Synthetic oligonucleotide
gcggagtttctgcctg

SEQ ID NO: 737 - DNA, 16 bp, Artificial sequence
  Synthetic oligonucleotide
gttcttaatcccggta

SEQ ID NO: 738 - DNA, 16 bp, Artificial sequence
  Synthetic oligonucleotide
tgtaaagcataggcac

SEQ ID NO: 739 - DNA, 16 bp, Artificial sequence
  Synthetic oligonucleotide
tgtaactctgataggt

SEQ ID NO: 740 - DNA, 16 bp, Artificial sequence
  Synthetic oligonucleotide
tcgggcttggctgtca

SEQ ID NO: 741 - DNA, 16 bp, Artificial sequence
  Synthetic oligonucleotide
gaaaccagaggcggct

SEQ ID NO: 742 - DNA, 16 bp, Artificial sequence
  Synthetic oligonucleotide
ccacaggagtccaaca

SEQ ID NO: 743 - DNA, 16 bp, Artificial sequence
  Synthetic oligonucleotide
ccggaccctgcgcttc

SEQ ID NO: 744 - DNA, 16 bp, Artificial sequence
  Synthetic oligonucleotide
tcaggagccttcgcgc

SEQ ID NO: 745 - DNA, 16 bp, Artificial sequence
  Synthetic oligonucleotide
tgccataaagccgaca

SEQ ID NO: 746 - DNA, 16 bp, Artificial sequence
  Synthetic oligonucleotide
ccgcatccacctagcc

SEQ ID NO: 747 - DNA, 16 bp, Artificial sequence
  Synthetic oligonucleotide
gccaaaggcttagcta

SEQ ID NO: 748 - DNA, 16 bp, Artificial sequence
  Synthetic oligonucleotide
atccaggtccacgggc

SEQ ID NO: 749 - DNA, 16 bp, Artificial sequence
  Synthetic oligonucleotide
gacaagcagtgctacg

SEQ ID NO: 750 - DNA, 16 bp, Artificial sequence
  Synthetic oligonucleotide
tgcttctagcaccaac

SEQ ID NO: 751 - DNA, 16 bp, Artificial sequence
  Synthetic oligonucleotide
agttaaatggttcgca

SEQ ID NO: 752 - DNA, 16 bp, Artificial sequence
  Synthetic oligonucleotide
cgaatatccccacact

SEQ ID NO: 753 - DNA, 16 bp, Artificial sequence
  Synthetic oligonucleotide
ccctactgcttgaatc

SEQ ID NO: 754 - DNA, 16 bp, Artificial sequence
  Synthetic oligonucleotide
gaaagaaggaaacgcg

SEQ ID NO: 755 - DNA, 16 bp, Artificial sequence
  Synthetic oligonucleotide
tgcaatagtctctggt

SEQ ID NO: 756 - DNA, 16 bp, Artificial sequence
  Synthetic oligonucleotide
ctccaacttggaatca

SEQ ID NO: 757 - DNA, 16 bp, Artificial sequence
  Synthetic oligonucleotide
agctcaacaattccct

SEQ ID NO: 758 - DNA, 16 bp, Artificial sequence
  Synthetic oligonucleotide
gagaaaccctaagggt

SEQ ID NO: 759 - DNA, 16 bp, Artificial sequence
  Synthetic oligonucleotide
gatcaccctatttgtt

SEQ ID NO: 760 - DNA, 16 bp, Artificial sequence
  Synthetic oligonucleotide
ttctacaccttcccgc

SEQ ID NO: 761 - DNA, 16 bp, Artificial sequence
  Synthetic oligonucleotide
gacttagaatccacaa

SEQ ID NO: 762 - DNA, 16 bp, Artificial sequence
  Synthetic oligonucleotide
gaacacgcattatgga

SEQ ID NO: 763 - DNA, 16 bp, Artificial sequence
  Synthetic oligonucleotide
ggttactggataatag

SEQ ID NO: 764 - DNA, 16 bp, Artificial sequence
  Synthetic oligonucleotide
gattcatgcggaaagc

SEQ ID NO: 765 - DNA, 16 bp, Artificial sequence
  Synthetic oligonucleotide
gctatattcttagccc

SEQ ID NO: 766 - DNA, 16 bp, Artificial sequence
  Synthetic oligonucleotide
agtagaacttatgttg

SEQ ID NO: 767 - DNA, 16 bp, Artificial sequence
  Synthetic oligonucleotide
tattagcacattggcc

SEQ ID NO: 768 - DNA, 16 bp, Artificial sequence
  Synthetic oligonucleotide
aaggacagcgagagga

SEQ ID NO: 769 - DNA, 16 bp, Artificial sequence
  Synthetic oligonucleotide
tgtaacacctctagcg

SEQ ID NO: 770 - DNA, 16 bp, Artificial sequence
  Synthetic oligonucleotide
atactaagttcctgga

SEQ ID NO: 771 - DNA, 16 bp, Artificial sequence
  Synthetic oligonucleotide
agagagacattgtagc

SEQ ID NO: 772 - DNA, 16 bp, Artificial sequence
  Synthetic oligonucleotide
ttctagtctagcactc

SEQ ID NO: 773 - DNA, 16 bp, Artificial sequence
  Synthetic oligonucleotide
ctgcagcatttaatcc

SEQ ID NO: 774 - DNA, 16 bp, Artificial sequence
  Synthetic oligonucleotide
gtgttaaagagggcct

SEQ ID NO: 775 - DNA, 16 bp, Artificial sequence
  Synthetic oligonucleotide
tctcaagcctgacctt

SEQ ID NO: 776 - DNA, 16 bp, Artificial sequence
  Synthetic oligonucleotide
gatgctaggcagaatc

SEQ ID NO: 777 - DNA, 16 bp, Artificial sequence
  Synthetic oligonucleotide
tagacaaggtcaccaa

SEQ ID NO: 778 - DNA, 16 bp, Artificial sequence
  Synthetic oligonucleotide
taagaagtacctcact

SEQ ID NO: 779 - DNA, 16 bp, Artificial sequence
  Synthetic oligonucleotide
acggaggacaggacac

SEQ ID NO: 780 - DNA, 16 bp, Artificial sequence
  Synthetic oligonucleotide
gtagatttcacatccc

SEQ ID NO: 781 - DNA, 16 bp, Artificial sequence
  Synthetic oligonucleotide
ttaaaggacctcaggt

SEQ ID NO: 782 - DNA, 16 bp, Artificial sequence
  Synthetic oligonucleotide
ctctgaacaggatggc

SEQ ID NO: 783 - DNA, 16 bp, Artificial sequence
  Synthetic oligonucleotide
gtgtactttggtaacc

SEQ ID NO: 784 - DNA, 16 bp, Artificial sequence
  Synthetic oligonucleotide
gagcatagacgggcgc

SEQ ID NO: 785 - DNA, 16 bp, Artificial sequence
  Synthetic oligonucleotide
gagcataggtcatctt

SEQ ID NO: 786 - DNA, 16 bp, Artificial sequence
  Synthetic oligonucleotide
gagataccagattcca

SEQ ID NO: 787 - DNA, 16 bp, Artificial sequence
  Synthetic oligonucleotide
cctacaggaagttcag

SEQ ID NO: 788 - DNA, 16 bp, Artificial sequence
  Synthetic oligonucleotide
gggcactggatatgca

SEQ ID NO: 789 - DNA, 16 bp, Artificial sequence
  Synthetic oligonucleotide
gggtatggaaacccct

SEQ ID NO: 790 - DNA, 16 bp, Artificial sequence
  Synthetic oligonucleotide
aagttctgctcagcgg

SEQ ID NO: 791 - DNA, 16 bp, Artificial sequence
  Synthetic oligonucleotide
cgatgatactcagcaa

SEQ ID NO: 792 - DNA, 16 bp, Artificial sequence
  Synthetic oligonucleotide
tgccagagatcagttg

SEQ ID NO: 793 - DNA, 16 bp, Artificial sequence
  Synthetic oligonucleotide
tgccccccttggtgag

SEQ ID NO: 794 - DNA, 16 bp, Artificial sequence
  Synthetic oligonucleotide
tgcctcaccgtgtaga

SEQ ID NO: 795 - DNA, 16 bp, Artificial sequence
  Synthetic oligonucleotide
gagtaatccgagttga

SEQ ID NO: 796 - DNA, 16 bp, Artificial sequence
  Synthetic oligonucleotide
cgtttccgcaagatca

SEQ ID NO: 797 - DNA, 16 bp, Artificial sequence
  Synthetic oligonucleotide
taaaccggagatatta

SEQ ID NO: 798 - DNA, 16 bp, Artificial sequence
  Synthetic oligonucleotide
gctacttctttaaggc

SEQ ID NO: 799 - DNA, 16 bp, Artificial sequence
  Synthetic oligonucleotide
agatggagttatctta

SEQ ID NO: 800 - DNA, 16 bp, Artificial sequence
  Synthetic oligonucleotide
ggtcacccaccagaaa

SEQ ID NO: 801 - DNA, 16 bp, Artificial sequence
  Synthetic oligonucleotide
gaggttcgggcagcgg

SEQ ID NO: 802 - DNA, 16 bp, Artificial sequence
  Synthetic oligonucleotide
tgccacaagccgtgtt

SEQ ID NO: 803 - DNA, 16 bp, Artificial sequence
  Synthetic oligonucleotide
tgacgaagatactcca

SEQ ID NO: 804 - DNA, 16 bp, Artificial sequence
  Synthetic oligonucleotide
ttgtttagatgattag

SEQ ID NO: 805 - DNA, 16 bp, Artificial sequence
  Synthetic oligonucleotide
agcagcctagctaggt

SEQ ID NO: 806 - DNA, 16 bp, Artificial sequence
  Synthetic oligonucleotide
ccaaggagtctagacg

SEQ ID NO: 807 - DNA, 16 bp, Artificial sequence
  Synthetic oligonucleotide
tcattgccagacagtc

SEQ ID NO: 808 - DNA, 16 bp, Artificial sequence
  Synthetic oligonucleotide
cgcgcgcgcgaagcaa

SEQ ID NO: 809 - DNA, 16 bp, Artificial sequence
  Synthetic oligonucleotide
gtcccgatcctcaggg

SEQ ID NO: 810 - DNA, 16 bp, Artificial sequence
  Synthetic oligonucleotide
actgggccgagcgacg

SEQ ID NO: 811 - DNA, 16 bp, Artificial sequence
  Synthetic oligonucleotide
agcggagtttctgcct

SEQ ID NO: 812 - DNA, 16 bp, Artificial sequence
  Synthetic oligonucleotide
tgttcttaatcccggt

SEQ ID NO: 813 - DNA, 16 bp, Artificial sequence
  Synthetic oligonucleotide
tcatttgcggcttgca

SEQ ID NO: 814 - DNA, 16 bp, Artificial sequence
  Synthetic oligonucleotide
ctgcactaaagtagct

SEQ ID NO: 815 - DNA, 16 bp, Artificial sequence
  Synthetic oligonucleotide
cagcagtcgggcttgg

SEQ ID NO: 816 - DNA, 16 bp, Artificial sequence
  Synthetic oligonucleotide
agccgatggcaggagg

SEQ ID NO: 817 - DNA, 16 bp, Artificial sequence
  Synthetic oligonucleotide
tcgagagggttgcccg

SEQ ID NO: 818 - DNA, 16 bp, Artificial sequence
  Synthetic oligonucleotide
gaccgcccgcgcgggt

SEQ ID NO: 819 - DNA, 16 bp, Artificial sequence
  Synthetic oligonucleotide
gtggaagctttactaa

SEQ ID NO: 820 - DNA, 16 bp, Artificial sequence
  Synthetic oligonucleotide
ggcgaaaagcacccgc

SEQ ID NO: 821 - DNA, 16 bp, Artificial sequence
  Synthetic oligonucleotide
atccaatgtcccaagg

SEQ ID NO: 822 - DNA, 16 bp, Artificial sequence
  Synthetic oligonucleotide
gatcatgtggatccag

SEQ ID NO: 823 - DNA, 16 bp, Artificial sequence
  Synthetic oligonucleotide
ggagaaaccggatgct

SEQ ID NO: 824 - DNA, 16 bp, Artificial sequence
  Synthetic oligonucleotide
ccctagtgcctctttg

SEQ ID NO: 825 - DNA, 16 bp, Artificial sequence
  Synthetic oligonucleotide
agtcacatggcgcagt

SEQ ID NO: 826 - DNA, 16 bp, Artificial sequence
  Synthetic oligonucleotide
aggcactggatacaat

SEQ ID NO: 827 - DNA, 16 bp, Artificial sequence
  Synthetic oligonucleotide
tgtaaataggtgtagg

SEQ ID NO: 828 - DNA, 16 bp, Artificial sequence
  Synthetic oligonucleotide
cgtgacaatgctgaga

SEQ ID NO: 829 - DNA, 16 bp, Artificial sequence
  Synthetic oligonucleotide
cataagctcttgttca

SEQ ID NO: 830 - DNA, 16 bp, Artificial sequence
  Synthetic oligonucleotide
tgtcactccaacttgg

SEQ ID NO: 831 - DNA, 16 bp, Artificial sequence
  Synthetic oligonucleotide
tacaggaaagctcaac

SEQ ID NO: 832 - DNA, 16 bp, Artificial sequence
  Synthetic oligonucleotide
gggtattggcatcaga

SEQ ID NO: 833 - DNA, 16 bp, Artificial sequence
  Synthetic oligonucleotide
tccattggatcaccct

SEQ ID NO: 834 - DNA, 16 bp, Artificial sequence
  Synthetic oligonucleotide
cggtatagaggaatga

SEQ ID NO: 835 - DNA, 16 bp, Artificial sequence
  Synthetic oligonucleotide
tgatatgcttgcaatc

SEQ ID NO: 836 - DNA, 16 bp, Artificial sequence
  Synthetic oligonucleotide
aatagagttctcctcc

SEQ ID NO: 837 - DNA, 16 bp, Artificial sequence
  Synthetic oligonucleotide
acgcagccactgaggt

SEQ ID NO: 838 - DNA, 16 bp, Artificial sequence
  Synthetic oligonucleotide
gcctatgattcatgcg

SEQ ID NO: 839 - DNA, 16 bp, Artificial sequence
  Synthetic oligonucleotide
cctcagctatattctt

SEQ ID NO: 840 - DNA, 16 bp, Artificial sequence
  Synthetic oligonucleotide
ggcgatactcttcccc

SEQ ID NO: 841 - DNA, 16 bp, Artificial sequence
  Synthetic oligonucleotide
agccaggttattagca

SEQ ID NO: 842 - DNA, 16 bp, Artificial sequence
  Synthetic oligonucleotide
tgccattgatcaaaag

SEQ ID NO: 843 - DNA, 16 bp, Artificial sequence
  Synthetic oligonucleotide
agctacctgcagacac

SEQ ID NO: 844 - DNA, 16 bp, Artificial sequence
  Synthetic oligonucleotide
gggatacatcaacaag

SEQ ID NO: 845 - DNA, 16 bp, Artificial sequence
  Synthetic oligonucleotide
aggcactcataagata

SEQ ID NO: 846 - DNA, 16 bp, Artificial sequence
  Synthetic oligonucleotide
ggcctttgattctagt

SEQ ID NO: 847 - DNA, 16 bp, Artificial sequence
  Synthetic oligonucleotide
tgtagagggaagccca

SEQ ID NO: 848 - DNA, 16 bp, Artificial sequence
  Synthetic oligonucleotide
catcactaggagttaa

SEQ ID NO: 849 - DNA, 16 bp, Artificial sequence
  Synthetic oligonucleotide
ctggaggcataatgta

SEQ ID NO: 850 - DNA, 16 bp, Artificial sequence
  Synthetic oligonucleotide
gcatgtaagatgctag

SEQ ID NO: 851 - DNA, 16 bp, Artificial sequence
  Synthetic oligonucleotide
agacatgtgtaagtag

SEQ ID NO: 852 - DNA, 16 bp, Artificial sequence
  Synthetic oligonucleotide
gtcttatagtacaggc

SEQ ID NO: 853 - DNA, 16 bp, Artificial sequence
  Synthetic oligonucleotide
cttgactgggattaac

SEQ ID NO: 854 - DNA, 16 bp, Artificial sequence
  Synthetic oligonucleotide
tgccgggcatgcacgc

SEQ ID NO: 855 - DNA, 16 bp, Artificial sequence
  Synthetic oligonucleotide
gacctgaatactgtct

SEQ ID NO: 856 - DNA, 16 bp, Artificial sequence
  Synthetic oligonucleotide
ttgacttaagccacct

SEQ ID NO: 857 - DNA, 16 bp, Artificial sequence
  Synthetic oligonucleotide
gcagagtgatccaaca

SEQ ID NO: 858 - DNA, 16 bp, Artificial sequence
  Synthetic oligonucleotide
ccccaagagcatagac

SEQ ID NO: 859 - DNA, 16 bp, Artificial sequence
  Synthetic oligonucleotide
aatgaccgggactccc

SEQ ID NO: 860 - DNA, 16 bp, Artificial sequence
  Synthetic oligonucleotide
ctaagaggagatacca

SEQ ID NO: 861 - DNA, 16 bp, Artificial sequence
  Synthetic oligonucleotide
aatgggacagcatcca

SEQ ID NO: 862 - DNA, 16 bp, Artificial sequence
  Synthetic oligonucleotide
gctaaagggcactgga

SEQ ID NO: 863 - DNA, 16 bp, Artificial sequence
  Synthetic oligonucleotide
attcaggctgcaagaa

SEQ ID NO: 864 - DNA, 16 bp, Artificial sequence
  Synthetic oligonucleotide
acttttactcgaaacc

SEQ ID NO: 865 - DNA, 16 bp, Artificial sequence
  Synthetic oligonucleotide
caagttctgctcagcg

SEQ ID NO: 866 - DNA, 16 bp, Artificial sequence
  Synthetic oligonucleotide
acgatgatactcagca

SEQ ID NO: 867 - DNA, 16 bp, Artificial sequence
  Synthetic oligonucleotide
ctgccagagatcagtt

SEQ ID NO: 868 - DNA, 16 bp, Artificial sequence
  Synthetic oligonucleotide
ctgccccccttggtga

SEQ ID NO: 869 - DNA, 16 bp, Artificial sequence
  Synthetic oligonucleotide
gtgcctcaccgtgtag

SEQ ID NO: 870 - DNA, 16 bp, Artificial sequence
  Synthetic oligonucleotide
ggagtaatccgagttg

SEQ ID NO: 871 - DNA, 16 bp, Artificial sequence
  Synthetic oligonucleotide
acagaccgtctgggcg

SEQ ID NO: 872 - DNA, 16 bp, Artificial sequence
  Synthetic oligonucleotide
tataaaccggagatat

SEQ ID NO: 873 - DNA, 16 bp, Artificial sequence
  Synthetic oligonucleotide
ttccttagctacttct

SEQ ID NO: 874 - DNA, 16 bp, Artificial sequence
  Synthetic oligonucleotide
cgagatggagttatct

SEQ ID NO: 875 - DNA, 16 bp, Artificial sequence
  Synthetic oligonucleotide
gggtcacccaccagaa

SEQ ID NO: 876 - DNA, 16 bp, Artificial sequence
  Synthetic oligonucleotide
agaggttcgggcagcg

SEQ ID NO: 877 - DNA, 16 bp, Artificial sequence
  Synthetic oligonucleotide
atgccacaagccgtgt

SEQ ID NO: 878 - DNA, 16 bp, Artificial sequence
  Synthetic oligonucleotide
tgtgacgaagatactc

SEQ ID NO: 879 - DNA, 16 bp, Artificial sequence
  Synthetic oligonucleotide
gttgtttagatgatta

SEQ ID NO: 880 - DNA, 16 bp, Artificial sequence
  Synthetic oligonucleotide
aatagcagcctagcta

SEQ ID NO: 881 - DNA, 16 bp, Artificial sequence
  Synthetic oligonucleotide
cggtcccaaggagtct

SEQ ID NO: 882 - DNA, 16 bp, Artificial sequence
  Synthetic oligonucleotide
gtcattgccagacagt

SEQ ID NO: 883 - DNA, 16 bp, Artificial sequence
  Synthetic oligonucleotide
gcgcgcgcgcgaagca

SEQ ID NO: 884 - DNA, 16 bp, Artificial sequence
  Synthetic oligonucleotide
tgtcccgatcctcagg

SEQ ID NO: 885 - DNA, 16 bp, Artificial sequence
  Synthetic oligonucleotide
gcactgggccgagcga

SEQ ID NO: 886 - DNA, 16 bp, Artificial sequence
  Synthetic oligonucleotide
ctgttcttaatcccgg

SEQ ID NO: 887 - DNA, 16 bp, Artificial sequence
  Synthetic oligonucleotide
acaaatgcaccatctc

SEQ ID NO: 888 - DNA, 16 bp, Artificial sequence
  Synthetic oligonucleotide
cccaaattgccaccac

SEQ ID NO: 889 - DNA, 16 bp, Artificial sequence
  Synthetic oligonucleotide
gcaaagtgttcctgca

SEQ ID NO: 890 - DNA, 16 bp, Artificial sequence
  Synthetic oligonucleotide
tgaattaagccgatgg

SEQ ID NO: 891 - DNA, 16 bp, Artificial sequence
  Synthetic oligonucleotide
aaagaatggctcgaga

SEQ ID NO: 892 - DNA, 16 bp, Artificial sequence
  Synthetic oligonucleotide
cgcagcccgaccgccc

SEQ ID NO: 893 - DNA, 16 bp, Artificial sequence
  Synthetic oligonucleotide
taccagtggaagcttt

SEQ ID NO: 894 - DNA, 16 bp, Artificial sequence
  Synthetic oligonucleotide
gcccagggatggcgaa

SEQ ID NO: 895 - DNA, 16 bp, Artificial sequence
  Synthetic oligonucleotide
agctagccccactgtc

SEQ ID NO: 896 - DNA, 16 bp, Artificial sequence
  Synthetic oligonucleotide
acacatcttctggaac

SEQ ID NO: 897 - DNA, 16 bp, Artificial sequence
  Synthetic oligonucleotide
cgggaacttcagccag

SEQ ID NO: 898 - DNA, 16 bp, Artificial sequence
  Synthetic oligonucleotide
aaataaccctagtgcc

SEQ ID NO: 899 - DNA, 16 bp, Artificial sequence
  Synthetic oligonucleotide
tgtcatggtcatgcac

SEQ ID NO: 900 - DNA, 16 bp, Artificial sequence
  Synthetic oligonucleotide
gccggagaggcactgg

SEQ ID NO: 901 - DNA, 16 bp, Artificial sequence
  Synthetic oligonucleotide
ggccgaatgactatat

SEQ ID NO: 902 - DNA, 16 bp, Artificial sequence
  Synthetic oligonucleotide
cctgagggacccgtga

SEQ ID NO: 903 - DNA, 16 bp, Artificial sequence
  Synthetic oligonucleotide
actgactggtttgtcc

SEQ ID NO: 904 - DNA, 16 bp, Artificial sequence
  Synthetic oligonucleotide
ggcttctggactgtca

SEQ ID NO: 905 - DNA, 16 bp, Artificial sequence
  Synthetic oligonucleotide
caatggaggtggccaa

SEQ ID NO: 906 - DNA, 16 bp, Artificial sequence
  Synthetic oligonucleotide
catactaattcctggg

SEQ ID NO: 907 - DNA, 16 bp, Artificial sequence
  Synthetic oligonucleotide
ctccagtgatgacttt

SEQ ID NO: 908 - DNA, 16 bp, Artificial sequence
  Synthetic oligonucleotide
ttgaatacccttcggt

SEQ ID NO: 909 - DNA, 16 bp, Artificial sequence
  Synthetic oligonucleotide
gcccagactactagtt

SEQ ID NO: 910 - DNA, 16 bp, Artificial sequence
  Synthetic oligonucleotide
ggtttaggaggaattc

SEQ ID NO: 911 - DNA, 16 bp, Artificial sequence
  Synthetic oligonucleotide
gggaataacacgcagc

SEQ ID NO: 912 - DNA, 16 bp, Artificial sequence
  Synthetic oligonucleotide
ggctaactttgcctat

SEQ ID NO: 913 - DNA, 16 bp, Artificial sequence
  Synthetic oligonucleotide
gaaatacatcagcccc

SEQ ID NO: 914 - DNA, 16 bp, Artificial sequence
  Synthetic oligonucleotide
ccccagtgtggcgata

SEQ ID NO: 915 - DNA, 16 bp, Artificial sequence
  Synthetic oligonucleotide
agccacaatgttcaca

SEQ ID NO: 916 - DNA, 16 bp, Artificial sequence
  Synthetic oligonucleotide
caacaagggattttcc

SEQ ID NO: 917 - DNA, 16 bp, Artificial sequence
  Synthetic oligonucleotide
gtgatagctacctgca

SEQ ID NO: 918 - DNA, 16 bp, Artificial sequence
  Synthetic oligonucleotide
gtgaactacactttca

SEQ ID NO: 919 - DNA, 16 bp, Artificial sequence
  Synthetic oligonucleotide
gtctatcatcaaccac

SEQ ID NO: 920 - DNA, 16 bp, Artificial sequence
  Synthetic oligonucleotide
ctaagaggcctttgat

SEQ ID NO: 921 - DNA, 16 bp, Artificial sequence
  Synthetic oligonucleotide
atccgctgcaaactca

SEQ ID NO: 922 - DNA, 16 bp, Artificial sequence
  Synthetic oligonucleotide
tgacagcacagtcctc

SEQ ID NO: 923 - DNA, 16 bp, Artificial sequence
  Synthetic oligonucleotide
gcacatcagggccatt

SEQ ID NO: 924 - DNA, 16 bp, Artificial sequence
  Synthetic oligonucleotide
atgctaggcagaatgc

SEQ ID NO: 925 - DNA, 16 bp, Artificial sequence
  Synthetic oligonucleotide
gtcataagacatgtgt

SEQ ID NO: 926 - DNA, 16 bp, Artificial sequence
  Synthetic oligonucleotide
aggtactggctatccc

SEQ ID NO: 927 - DNA, 16 bp, Artificial sequence
  Synthetic oligonucleotide
ctcagatgatcttgac

SEQ ID NO: 928 - DNA, 16 bp, Artificial sequence
  Synthetic oligonucleotide
ggagaggcatttgccg

SEQ ID NO: 929 - DNA, 16 bp, Artificial sequence
  Synthetic oligonucleotide
atccatcccacaacta

SEQ ID NO: 930 - DNA, 16 bp, Artificial sequence
  Synthetic oligonucleotide
ggtatttgacttaagc

SEQ ID NO: 931 - DNA, 16 bp, Artificial sequence
  Synthetic oligonucleotide
gtaagtagctaacagt

SEQ ID NO: 932 - DNA, 16 bp, Artificial sequence
  Synthetic oligonucleotide
ttcgagagagggaagg

SEQ ID NO: 933 - DNA, 16 bp, Artificial sequence
  Synthetic oligonucleotide
gggtaagtgaggccct

SEQ ID NO: 934 - DNA, 16 bp, Artificial sequence
  Synthetic oligonucleotide
ccccgatttcactgac

SEQ ID NO: 935 - DNA, 16 bp, Artificial sequence
  Synthetic oligonucleotide
tggaaccaaaatggga

SEQ ID NO: 936 - DNA, 16 bp, Artificial sequence
  Synthetic oligonucleotide
ccccaaggttgcattt

SEQ ID NO: 937 - DNA, 16 bp, Artificial sequence
  Synthetic oligonucleotide
actacatggccagcag

SEQ ID NO: 938 - DNA, 16 bp, Artificial sequence
  Synthetic oligonucleotide
caaaaccgcggcgact

SEQ ID NO: 939 - DNA, 16 bp, Artificial sequence
  Synthetic oligonucleotide
gaagccagaccaggcg

SEQ ID NO: 940 - DNA, 16 bp, Artificial sequence
  Synthetic oligonucleotide
ccctgtaactgaagcc

SEQ ID NO: 941 - DNA, 16 bp, Artificial sequence
  Synthetic oligonucleotide
tccccgagatgttccc

SEQ ID NO: 942 - DNA, 16 bp, Artificial sequence
  Synthetic oligonucleotide
aaccaggctccccgag

SEQ ID NO: 943 - DNA, 16 bp, Artificial sequence
  Synthetic oligonucleotide
ttccaaccaggctccc

SEQ ID NO: 944 - DNA, 16 bp, Artificial sequence
  Synthetic oligonucleotide
gttaaggcaagaccct

SEQ ID NO: 945 - DNA, 16 bp, Artificial sequence
  Synthetic oligonucleotide
ggatgttaaggcaaga

SEQ ID NO: 946 - DNA, 16 bp, Artificial sequence
  Synthetic oligonucleotide
caagcagatttctttg

SEQ ID NO: 947 - DNA, 16 bp, Artificial sequence
  Synthetic oligonucleotide
aaccccttcttccaag

SEQ ID NO: 948 - DNA, 16 bp, Artificial sequence
  Synthetic oligonucleotide
tttctgcccggccaaa

SEQ ID NO: 949 - DNA, 16 bp, Artificial sequence
  Synthetic oligonucleotide
gtaactgaagccagac

SEQ ID NO: 950 - DNA, 16 bp, Artificial sequence
  Synthetic oligonucleotide
tgctccctgtaactga

SEQ ID NO: 951 - DNA, 16 bp, Artificial sequence
  Synthetic oligonucleotide
gtggtgctccctgtaa

SEQ ID NO: 952 - DNA, 16 bp, Artificial sequence
  Synthetic oligonucleotide
ccctggtggtgctccc

SEQ ID NO: 953 - DNA, 16 bp, Artificial sequence
  Synthetic oligonucleotide
atgttccctggtggtg

SEQ ID NO: 954 - DNA, 16 bp, Artificial sequence
  Synthetic oligonucleotide
cgagatgttccctggt

SEQ ID NO: 955 - DNA, 16 bp, Artificial sequence
  Synthetic oligonucleotide
aggctccccgagatgt

SEQ ID NO: 956 - DNA, 16 bp, Artificial sequence
  Synthetic oligonucleotide
gcagcttccaaccagg

SEQ ID NO: 957 - DNA, 16 bp, Artificial sequence
  Synthetic oligonucleotide
taagcctgcagcttcc

SEQ ID NO: 958 - DNA, 16 bp, Artificial sequence
  Synthetic oligonucleotide
agactaagcctgcagc

SEQ ID NO: 959 - DNA, 16 bp, Artificial sequence
  Synthetic oligonucleotide
cgacagactaagcctg

SEQ ID NO: 960 - DNA, 16 bp, Artificial sequence
  Synthetic oligonucleotide
cagccgacagactaag

SEQ ID NO: 961 - DNA, 16 bp, Artificial sequence
  Synthetic oligonucleotide
cccgcagccgacagac

SEQ ID NO: 962 - DNA, 16 bp, Artificial sequence
  Synthetic oligonucleotide
gagacccgcagccgac

SEQ ID NO: 963 - DNA, 16 bp, Artificial sequence
  Synthetic oligonucleotide
gtcagagacccgcagc

SEQ ID NO: 964 - DNA, 16 bp, Artificial sequence
  Synthetic oligonucleotide
ggcagtcagagacccg

SEQ ID NO: 965 - DNA, 16 bp, Artificial sequence
  Synthetic oligonucleotide
caagggatgttaaggc

SEQ ID NO: 966 - DNA, 16 bp, Artificial sequence
  Synthetic oligonucleotide
aatgcaagggatgtta

SEQ ID NO: 967 - DNA, 16 bp, Artificial sequence
  Synthetic oligonucleotide
agccaaatgcaaggga

SEQ ID NO: 968 - DNA, 16 bp, Artificial sequence
  Synthetic oligonucleotide
tgcccggccaaacagc

SEQ ID NO: 969 - DNA, 16 bp, Artificial sequence
  Synthetic oligonucleotide
ggagtttctgcccggc

SEQ ID NO: 970 - DNA, 16 bp, Artificial sequence
  Synthetic oligonucleotide
cagcggagtttctgcc

SEQ ID NO: 971 - DNA, 16 bp, Artificial sequence
  Synthetic oligonucleotide
aataaaactcacccgg

SEQ ID NO: 972 - DNA, 16 bp, Artificial sequence
  Synthetic oligonucleotide
acccagaggcacagtt

SEQ ID NO: 973 - DNA, 16 bp, Artificial sequence
  Synthetic oligonucleotide
gtaaagcataggcaca

SEQ ID NO: 974 - DNA, 16 bp, Artificial sequence
  Synthetic oligonucleotide
aattaggcaattcttg

SEQ ID NO: 975 - DNA, 16 bp, Artificial sequence
  Synthetic oligonucleotide
ctccagtcaattccaa

SEQ ID NO: 976 - DNA, 16 bp, Artificial sequence
  Synthetic oligonucleotide
cttttaaccaaggata

SEQ ID NO: 977 - DNA, 16 bp, Artificial sequence
  Synthetic oligonucleotide
gggaaaaagcatctag

SEQ ID NO: 978 - DNA, 16 bp, Artificial sequence
  Synthetic oligonucleotide
ccctaacctgcttacc

SEQ ID NO: 979 - DNA, 16 bp, Artificial sequence
  Synthetic oligonucleotide
gtaaacccaacccatc

SEQ ID NO: 980 - DNA, 16 bp, Artificial sequence
  Synthetic oligonucleotide
atatactgccagacag

SEQ ID NO: 981 - DNA, 16 bp, Artificial sequence
  Synthetic oligonucleotide
taatcaataaccaccc

SEQ ID NO: 982 - DNA, 16 bp, Artificial sequence
  Synthetic oligonucleotide
atattgggtgctacag

SEQ ID NO: 983 - DNA, 16 bp, Artificial sequence
  Synthetic oligonucleotide
taataaagtctaatac

SEQ ID NO: 984 - DNA, 16 bp, Artificial sequence
  Synthetic oligonucleotide
agcatatctaactcag

SEQ ID NO: 985 - DNA, 16 bp, Artificial sequence
  Synthetic oligonucleotide
tctaagtaagcacttt

SEQ ID NO: 986 - DNA, 16 bp, Artificial sequence
  Synthetic oligonucleotide
cacaacatactcagga

SEQ ID NO: 987 - DNA, 16 bp, Artificial sequence
  Synthetic oligonucleotide
aacacttatgtgatca

SEQ ID NO: 988 - DNA, 16 bp, Artificial sequence
  Synthetic oligonucleotide
ccacaggtcattttat

SEQ ID NO: 989 - DNA, 16 bp, Artificial sequence
  Synthetic oligonucleotide
ctaaagacatggcagt

SEQ ID NO: 990 - DNA, 16 bp, Artificial sequence
  Synthetic oligonucleotide
tgcactaaagtagctt

SEQ ID NO: 991 - DNA, 16 bp, Artificial sequence
  Synthetic oligonucleotide
ccaaattgccaccact

SEQ ID NO: 992 - DNA, 16 bp, Artificial sequence
  Synthetic oligonucleotide
aacataataagggccc

SEQ ID NO: 993 - DNA, 16 bp, Artificial sequence
  Synthetic oligonucleotide
ttctcaggtgcaaaag

SEQ ID NO: 994 - DNA, 16 bp, Artificial sequence
  Synthetic oligonucleotide
acctaatcaccctgct

SEQ ID NO: 995 - DNA, 16 bp, Artificial sequence
  Synthetic oligonucleotide
ttatatgcatggtctg

SEQ ID NO: 996 - DNA, 16 bp, Artificial sequence
  Synthetic oligonucleotide
acggtaagtaaaaata

SEQ ID NO: 997 - DNA, 16 bp, Artificial sequence
  Synthetic oligonucleotide
tttagctaattgtata

SEQ ID NO: 998 - DNA, 16 bp, Artificial sequence
  Synthetic oligonucleotide
tattttacgatttgaa

SEQ ID NO: 999 - DNA, 16 bp, Artificial sequence
  Synthetic oligonucleotide
gtcatagaagctcatc

SEQ ID NO: 1000 - DNA, 16 bp, Artificial sequence
  Synthetic oligonucleotide
ggccagccttgaggca

SEQ ID NO: 1001 - DNA, 16 bp, Artificial sequence
  Synthetic oligonucleotide
ttacagggagagaggc

SEQ ID NO: 1002 - DNA, 16 bp, Artificial sequence
  Synthetic oligonucleotide
ctgcagcagtcgggct

SEQ ID NO: 1003 - DNA, 16 bp, Artificial sequence
  Synthetic oligonucleotide
caccgaataagctcta

SEQ ID NO: 1004 - DNA, 16 bp, Artificial sequence
  Synthetic oligonucleotide
aggcaaaaccagacta

SEQ ID NO: 1005 - DNA, 16 bp, Artificial sequence
  Synthetic oligonucleotide
gggaagaaaagtccgg

SEQ ID NO: 1006 - DNA, 16 bp, Artificial sequence
  Synthetic oligonucleotide
tgccagcttcctagga

SEQ ID NO: 1007 - DNA, 16 bp, Artificial sequence
  Synthetic oligonucleotide
gctattactgtctgca

SEQ ID NO: 1008 - DNA, 16 bp, Artificial sequence
  Synthetic oligonucleotide
ctaatagagggcagcg

SEQ ID NO: 1009 - DNA, 16 bp, Artificial sequence
  Synthetic oligonucleotide
gccaaatgtagctcag

SEQ ID NO: 1010 - DNA, 16 bp, Artificial sequence
  Synthetic oligonucleotide
aaccagaggcggctga

SEQ ID NO: 1011 - DNA, 16 bp, Artificial sequence
  Synthetic oligonucleotide
ggcgacttttactcga

SEQ ID NO: 1012 - DNA, 16 bp, Artificial sequence
  Synthetic oligonucleotide
ctgcaaaaccgcggcg

SEQ ID NO: 1013 - DNA, 16 bp, Artificial sequence
  Synthetic oligonucleotide
caagaaaaagtcggtc

SEQ ID NO: 1014 - DNA, 16 bp, Artificial sequence
  Synthetic oligonucleotide
ccttaaatgcgcctca

SEQ ID NO: 1015 - DNA, 16 bp, Artificial sequence
  Synthetic oligonucleotide
ggcaggagacagtcac

SEQ ID NO: 1016 - DNA, 16 bp, Artificial sequence
  Synthetic oligonucleotide
ggcaagttctgctcag

SEQ ID NO: 1017 - DNA, 16 bp, Artificial sequence
  Synthetic oligonucleotide
ggacgatgatactcag

SEQ ID NO: 1018 - DNA, 16 bp, Artificial sequence
  Synthetic oligonucleotide
gctacagttctgccag

SEQ ID NO: 1019 - DNA, 16 bp, Artificial sequence
  Synthetic oligonucleotide
cctgccccccttggtg

SEQ ID NO: 1020 - DNA, 16 bp, Artificial sequence
  Synthetic oligonucleotide
gggtgcctcaccgtgt

SEQ ID NO: 1021 - DNA, 16 bp, Artificial sequence
  Synthetic oligonucleotide
aggagtaatccgagtt

SEQ ID NO: 1022 - DNA, 16 bp, Artificial sequence
  Synthetic oligonucleotide
gacagaccgtctgggc

SEQ ID NO: 1023 - DNA, 16 bp, Artificial sequence
  Synthetic oligonucleotide
ttataaaccggagata

SEQ ID NO: 1024 - DNA, 16 bp, Artificial sequence
  Synthetic oligonucleotide
gttccttagctacttc

SEQ ID NO: 1025 - DNA, 16 bp, Artificial sequence
  Synthetic oligonucleotide
gcgagatggagttatc

SEQ ID NO: 1026 - DNA, 16 bp, Artificial sequence
  Synthetic oligonucleotide
tgggtcacccaccaga

SEQ ID NO: 1027 - DNA, 16 bp, Artificial sequence
  Synthetic oligonucleotide
cacagaggttcgggca

SEQ ID NO: 1028 - DNA, 16 bp, Artificial sequence
  Synthetic oligonucleotide
caatgccacaagccgt

SEQ ID NO: 1029 - DNA, 16 bp, Artificial sequence
  Synthetic oligonucleotide
gtgtgacgaagatact

SEQ ID NO: 1030 - DNA, 16 bp, Artificial sequence
  Synthetic oligonucleotide
gagttgtttagatgat

SEQ ID NO: 1031 - DNA, 16 bp, Artificial sequence
  Synthetic oligonucleotide
ataatagcagcctagc

SEQ ID NO: 1032 - DNA, 16 bp, Artificial sequence
  Synthetic oligonucleotide
acggtcccaaggagtc

SEQ ID NO: 1033 - DNA, 16 bp, Artificial sequence
  Synthetic oligonucleotide
aagtcattgccagaca

SEQ ID NO: 1034 - DNA, 16 bp, Artificial sequence
  Synthetic oligonucleotide
ctgcgcgcgcgcgaag

SEQ ID NO: 1035 - DNA, 16 bp, Artificial sequence
  Synthetic oligonucleotide
ctgtcccgatcctcag

SEQ ID NO: 1036 - DNA, 16 bp, Artificial sequence
  Synthetic oligonucleotide
cgcactgggccgagcg

SEQ ID NO: 1037 - DNA, 16 bp, Artificial sequence
  Synthetic oligonucleotide
tctgttcttaatcccg

SEQ ID NO: 1038 - DNA, 16 bp, Artificial sequence
  Synthetic oligonucleotide
gagtatatatccacct

SEQ ID NO: 1039 - DNA, 16 bp, Artificial sequence
  Synthetic oligonucleotide
aataagggcccagtgc

SEQ ID NO: 1040 - DNA, 16 bp, Artificial sequence
  Synthetic oligonucleotide
ccgaataagctctagg

SEQ ID NO: 1041 - DNA, 16 bp, Artificial sequence
  Synthetic oligonucleotide
gaaaaagtcggtccct

SEQ ID NO: 1042 - DNA, 16 bp, Artificial sequence
  Synthetic oligonucleotide
aagtacccaatcccag

SEQ ID NO: 1043 - DNA, 16 bp, Artificial sequence
  Synthetic oligonucleotide
gcagagccagagtagt

SEQ ID NO: 1044 - DNA, 16 bp, Artificial sequence
  Synthetic oligonucleotide
gcggaaggcccggcct

SEQ ID NO: 1045 - DNA, 16 bp, Artificial sequence
  Synthetic oligonucleotide
agttactctgatggcc

SEQ ID NO: 1046 - DNA, 16 bp, Artificial sequence
  Synthetic oligonucleotide
gatagatatcctgagt

SEQ ID NO: 1047 - DNA, 16 bp, Artificial sequence
  Synthetic oligonucleotide
actgacggtgcagtga

SEQ ID NO: 1048 - DNA, 16 bp, Artificial sequence
  Synthetic oligonucleotide
gttaggaaagctctgc

SEQ ID NO: 1049 - DNA, 16 bp, Artificial sequence
  Synthetic oligonucleotide
tgctccgggaacttca

SEQ ID NO: 1050 - DNA, 16 bp, Artificial sequence
  Synthetic oligonucleotide
actaaggaggcattgt

SEQ ID NO: 1051 - DNA, 16 bp, Artificial sequence
  Synthetic oligonucleotide
tggcaacccccagaga

SEQ ID NO: 1052 - DNA, 16 bp, Artificial sequence
  Synthetic oligonucleotide
ttccagatccttgtat

SEQ ID NO: 1053 - DNA, 16 bp, Artificial sequence
  Synthetic oligonucleotide
ccccaaggccgaatga

SEQ ID NO: 1054 - DNA, 16 bp, Artificial sequence
  Synthetic oligonucleotide
aggcattggaacaatg

SEQ ID NO: 1055 - DNA, 16 bp, Artificial sequence
  Synthetic oligonucleotide
ttcttaccattgcccc

SEQ ID NO: 1056 - DNA, 16 bp, Artificial sequence
  Synthetic oligonucleotide
gccttatagaggcttc

SEQ ID NO: 1057 - DNA, 16 bp, Artificial sequence
  Synthetic oligonucleotide
tgcccttagacaatgg

SEQ ID NO: 1058 - DNA, 16 bp, Artificial sequence
  Synthetic oligonucleotide
gactatagattccagg

SEQ ID NO: 1059 - DNA, 16 bp, Artificial sequence
  Synthetic oligonucleotide
tctaaatctcagacca

SEQ ID NO: 1060 - DNA, 16 bp, Artificial sequence
  Synthetic oligonucleotide
acaacattgaataccc

SEQ ID NO: 1061 - DNA, 16 bp, Artificial sequence
  Synthetic oligonucleotide
ggcagacccggtgcag

SEQ ID NO: 1062 - DNA, 16 bp, Artificial sequence
  Synthetic oligonucleotide
cttcaggtttaggagg

SEQ ID NO: 1063 - DNA, 16 bp, Artificial sequence
  Synthetic oligonucleotide
ctgcactttgacatcc

SEQ ID NO: 1064 - DNA, 16 bp, Artificial sequence
  Synthetic oligonucleotide
cccatatgcttcgccc

SEQ ID NO: 1065 - DNA, 16 bp, Artificial sequence
  Synthetic oligonucleotide
ggtcagattcctgctg

SEQ ID NO: 1066 - DNA, 16 bp, Artificial sequence
  Synthetic oligonucleotide
attaacacaagcccca

SEQ ID NO: 1067 - DNA, 16 bp, Artificial sequence
  Synthetic oligonucleotide
ggtcacaccaagcagt

SEQ ID NO: 1068 - DNA, 16 bp, Artificial sequence
  Synthetic oligonucleotide
ggctagtggaattctg

SEQ ID NO: 1069 - DNA, 16 bp, Artificial sequence
  Synthetic oligonucleotide
tggataatatcagcag

SEQ ID NO: 1070 - DNA, 16 bp, Artificial sequence
  Synthetic oligonucleotide
gtatacacttctaagc

SEQ ID NO: 1071 - DNA, 16 bp, Artificial sequence
  Synthetic oligonucleotide
ttcaaccataagcaca

SEQ ID NO: 1072 - DNA, 16 bp, Artificial sequence
  Synthetic oligonucleotide
gccaaatctaagaggc

SEQ ID NO: 1073 - DNA, 16 bp, Artificial sequence
  Synthetic oligonucleotide
ggcttacacttcctta

SEQ ID NO: 1074 - DNA, 16 bp, Artificial sequence
  Synthetic oligonucleotide
ggcctgaagggccatg

SEQ ID NO: 1075 - DNA, 16 bp, Artificial sequence
  Synthetic oligonucleotide
tcttagcacatcaggg

SEQ ID NO: 1076 - DNA, 16 bp, Artificial sequence
  Synthetic oligonucleotide
gatgctaggcagaatg

SEQ ID NO: 1077 - DNA, 16 bp, Artificial sequence
  Synthetic oligonucleotide
agccagcaaccatcca

SEQ ID NO: 1078 - DNA, 16 bp, Artificial sequence
  Synthetic oligonucleotide
gaagatgaaggtactg

SEQ ID NO: 1079 - DNA, 16 bp, Artificial sequence
  Synthetic oligonucleotide
gaccaactctcagatg

SEQ ID NO: 1080 - DNA, 16 bp, Artificial sequence
  Synthetic oligonucleotide
gtgcattggagaggca

SEQ ID NO: 1081 - DNA, 16 bp, Artificial sequence
  Synthetic oligonucleotide
acctaggcagtggatc

SEQ ID NO: 1082 - DNA, 16 bp, Artificial sequence
  Synthetic oligonucleotide
ccataatcatccgtcc

SEQ ID NO: 1083 - DNA, 16 bp, Artificial sequence
  Synthetic oligonucleotide
gggaatagagcttcaa

SEQ ID NO: 1084 - DNA, 16 bp, Artificial sequence
  Synthetic oligonucleotide
cgatggaatttcgaga

SEQ ID NO: 1085 - DNA, 16 bp, Artificial sequence
  Synthetic oligonucleotide
ggcaagggtaagtgag

SEQ ID NO: 1086 - DNA, 16 bp, Artificial sequence
  Synthetic oligonucleotide
agctactccccgattt

SEQ ID NO: 1087 - DNA, 16 bp, Artificial sequence
  Synthetic oligonucleotide
caatagtcttggaacc

SEQ ID NO: 1088 - DNA, 16 bp, Artificial sequence
  Synthetic oligonucleotide
aggcaagctccatttc

SEQ ID NO: 1089 - DNA, 16 bp, Artificial sequence
  Synthetic oligonucleotide
ggccacactacatggc

SEQ ID NO: 1090 - DNA, 16 bp, Artificial sequence
  Synthetic oligonucleotide
cagcactcatcacgca

SEQ ID NO: 1091 - DNA, 16 bp, Artificial sequence
  Synthetic oligonucleotide
ggcggcaagttctgct

SEQ ID NO: 1092 - DNA, 16 bp, Artificial sequence
  Synthetic oligonucleotide
tggaggacgatgatac

SEQ ID NO: 1093 - DNA, 16 bp, Artificial sequence
  Synthetic oligonucleotide
aggtgctacagttctg

SEQ ID NO: 1094 - DNA, 16 bp, Artificial sequence
  Synthetic oligonucleotide
ctccgggtgcctcacc

SEQ ID NO: 1095 - DNA, 16 bp, Artificial sequence
  Synthetic oligonucleotide
ccgtaggagtaatccg

SEQ ID NO: 1096 - DNA, 16 bp, Artificial sequence
  Synthetic oligonucleotide
gcctcagacagaccgt

SEQ ID NO: 1097 - DNA, 16 bp, Artificial sequence
  Synthetic oligonucleotide
ggttttataaaccgga

SEQ ID NO: 1098 - DNA, 16 bp, Artificial sequence
  Synthetic oligonucleotide
taaagttccttagcta

SEQ ID NO: 1099 - DNA, 16 bp, Artificial sequence
  Synthetic oligonucleotide
gaggtatcttctttca

SEQ ID NO: 1100 - DNA, 16 bp, Artificial sequence
  Synthetic oligonucleotide
tggatgcactgggtca

SEQ ID NO: 1101 - DNA, 16 bp, Artificial sequence
  Synthetic oligonucleotide
cgtaaagcttcacaca

SEQ ID NO: 1102 - DNA, 16 bp, Artificial sequence
  Synthetic oligonucleotide
caagtatgccaatgcc

SEQ ID NO: 1103 - DNA, 16 bp, Artificial sequence
  Synthetic oligonucleotide
gatgtgtgacgaagat

SEQ ID NO: 1104 - DNA, 16 bp, Artificial sequence
  Synthetic oligonucleotide
ccagtgagttgtttag

SEQ ID NO: 1105 - DNA, 16 bp, Artificial sequence
  Synthetic oligonucleotide
gggagtgatgaaggct

SEQ ID NO: 1106 - DNA, 16 bp, Artificial sequence
  Synthetic oligonucleotide
ctcacggtcccaagga

SEQ ID NO: 1107 - DNA, 16 bp, Artificial sequence
  Synthetic oligonucleotide
atacaagtcattgcca

SEQ ID NO: 1108 - DNA, 16 bp, Artificial sequence
  Synthetic oligonucleotide
ccaaagctgcgctgcg

SEQ ID NO: 1109 - DNA, 16 bp, Artificial sequence
  Synthetic oligonucleotide
acagctgtcccgatcc

SEQ ID NO: 1110 - DNA, 16 bp, Artificial sequence
  Synthetic oligonucleotide
ggcgcgcgcagaggga

SEQ ID NO: 1111 - DNA, 16 bp, Artificial sequence
  Synthetic oligonucleotide
ccgaacgcactgggcc

SEQ ID NO: 1112 - DNA, 16 bp, Artificial sequence
  Synthetic oligonucleotide
gctatattgatctttc

SEQ ID NO: 1113 - DNA, 16 bp, Artificial sequence
  Synthetic oligonucleotide
ctggatgcattagggt

SEQ ID NO: 1114 - DNA, 16 bp, Artificial sequence
  Synthetic oligonucleotide
ggttaggcactctggc

SEQ ID NO: 1115 - DNA, 16 bp, Artificial sequence
  Synthetic oligonucleotide
gcctaggcaaaaccag

SEQ ID NO: 1116 - DNA, 16 bp, Artificial sequence
  Synthetic oligonucleotide
ttaacgggaacaacgc

SEQ ID NO: 1117 - DNA, 16 bp, Artificial sequence
  Synthetic oligonucleotide
tgttagaggacatgca

SEQ ID NO: 1118 - DNA, 16 bp, Artificial sequence
  Synthetic oligonucleotide
gctcagcctcgcgcag

SEQ ID NO: 1119 - DNA, 16 bp, Artificial sequence
  Synthetic oligonucleotide
cgccaggcactcacgc

SEQ ID NO: 1120 - DNA, 16 bp, Artificial sequence
  Synthetic oligonucleotide
cttacaatgtgcctta

SEQ ID NO: 1121 - DNA, 16 bp, Artificial sequence
  Synthetic oligonucleotide
cctcaccgtttggtga

SEQ ID NO: 1122 - DNA, 16 bp, Artificial sequence
  Synthetic oligonucleotide
ccccatcttgcaacaa

SEQ ID NO: 1123 - DNA, 16 bp, Artificial sequence
  Synthetic oligonucleotide
tatgagtagctccagc

SEQ ID NO: 1124 - DNA, 16 bp, Artificial sequence
  Synthetic oligonucleotide
cagtagcgagtacgga

SEQ ID NO: 1125 - DNA, 16 bp, Artificial sequence
  Synthetic oligonucleotide
cggaaagcaacgaggc

SEQ ID NO: 1126 - DNA, 16 bp, Artificial sequence
  Synthetic oligonucleotide
gcacgatgccaggagg

SEQ ID NO: 1127 - DNA, 16 bp, Artificial sequence
  Synthetic oligonucleotide
gaccaggctcgggacc

SEQ ID NO: 1128 - DNA, 16 bp, Artificial sequence
  Synthetic oligonucleotide
gaaagtattccacacc

SEQ ID NO: 1129 - DNA, 16 bp, Artificial sequence
  Synthetic oligonucleotide
caaacgaggaagcagc

SEQ ID NO: 1130 - DNA, 16 bp, Artificial sequence
  Synthetic oligonucleotide
tcatatggctggctcc

SEQ ID NO: 1131 - DNA, 16 bp, Artificial sequence
  Synthetic oligonucleotide
agtgataagaatcccg

SEQ ID NO: 1132 - DNA, 16 bp, Artificial sequence
  Synthetic oligonucleotide
atccacaacctcaggc

SEQ ID NO: 1133 - DNA, 16 bp, Artificial sequence
  Synthetic oligonucleotide
caatgatgtcccaact

SEQ ID NO: 1134 - DNA, 16 bp, Artificial sequence
  Synthetic oligonucleotide
gcccaagacttagctc

SEQ ID NO: 1135 - DNA, 16 bp, Artificial sequence
  Synthetic oligonucleotide
caggtcctacctcaat

SEQ ID NO: 1136 - DNA, 16 bp, Artificial sequence
  Synthetic oligonucleotide
gcaattgcagtcatga

SEQ ID NO: 1137 - DNA, 16 bp, Artificial sequence
  Synthetic oligonucleotide
ttcctaattaagaggc

SEQ ID NO: 1138 - DNA, 16 bp, Artificial sequence
  Synthetic oligonucleotide
gtatgaatgtcattcc

SEQ ID NO: 1139 - DNA, 16 bp, Artificial sequence
  Synthetic oligonucleotide
gcagatagtgggaagc

SEQ ID NO: 1140 - DNA, 16 bp, Artificial sequence
  Synthetic oligonucleotide
gatcaaacctagtgtg

SEQ ID NO: 1141 - DNA, 16 bp, Artificial sequence
  Synthetic oligonucleotide
gttaaaggatagtgca

SEQ ID NO: 1142 - DNA, 16 bp, Artificial sequence
  Synthetic oligonucleotide
acagatgcagcactct

SEQ ID NO: 1143 - DNA, 16 bp, Artificial sequence
  Synthetic oligonucleotide
cgtaaaaggtgcccaa

SEQ ID NO: 1144 - DNA, 16 bp, Artificial sequence
  Synthetic oligonucleotide
ggctcaacatatacct

SEQ ID NO: 1145 - DNA, 16 bp, Artificial sequence
  Synthetic oligonucleotide
tgaatacctactgctt

SEQ ID NO: 1146 - DNA, 16 bp, Artificial sequence
  Synthetic oligonucleotide
gtgttttcatgagccc

SEQ ID NO: 1147 - DNA, 16 bp, Artificial sequence
  Synthetic oligonucleotide
cgccaaccaccagacg

SEQ ID NO: 1148 - DNA, 16 bp, Artificial sequence
  Synthetic oligonucleotide
taccatccacaactta

SEQ ID NO: 1149 - DNA, 16 bp, Artificial sequence
  Synthetic oligonucleotide
catacctgataactac

SEQ ID NO: 1150 - DNA, 16 bp, Artificial sequence
  Synthetic oligonucleotide
cagtaagtcaacagac

SEQ ID NO: 1151 - DNA, 16 bp, Artificial sequence
  Synthetic oligonucleotide
ccccagaatatgttac

SEQ ID NO: 1152 - DNA, 16 bp, Artificial sequence
  Synthetic oligonucleotide
gatgtaatgatgttgc

SEQ ID NO: 1153 - DNA, 16 bp, Artificial sequence
  Synthetic oligonucleotide
agccatttccagtgca

SEQ ID NO: 1154 - DNA, 16 bp, Artificial sequence
  Synthetic oligonucleotide
agccacttccggagac

SEQ ID NO: 1155 - DNA, 16 bp, Artificial sequence
  Synthetic oligonucleotide
ggattagggacagttt

SEQ ID NO: 1156 - DNA, 16 bp, Artificial sequence
  Synthetic oligonucleotide
agccacccatagcatt

SEQ ID NO: 1157 - DNA, 16 bp, Artificial sequence
  Synthetic oligonucleotide
cagtagaaggctggct

SEQ ID NO: 1158 - DNA, 16 bp, Artificial sequence
  Synthetic oligonucleotide
ccaagataagtgagac

SEQ ID NO: 1159 - DNA, 16 bp, Artificial sequence
  Synthetic oligonucleotide
gccaaatacccctagt

SEQ ID NO: 1160 - DNA, 16 bp, Artificial sequence
  Synthetic oligonucleotide
tcccaaatgggctgtc

SEQ ID NO: 1161 - DNA, 16 bp, Artificial sequence
  Synthetic oligonucleotide
tgccacttgactggcc

SEQ ID NO: 1162 - DNA, 16 bp, Artificial sequence
  Synthetic oligonucleotide
cgacagtatgactggg

SEQ ID NO: 1163 - DNA, 16 bp, Artificial sequence
  Synthetic oligonucleotide
ggccacctaggcctta

SEQ ID NO: 1164 - DNA, 16 bp, Artificial sequence
  Synthetic oligonucleotide
cacaacctattgatag

SEQ ID NO: 1165 - DNA, 16 bp, Artificial sequence
  Synthetic oligonucleotide
tccagtgagttgttta

SEQ ID NO: 1166 - DNA, 16 bp, Artificial sequence
  Synthetic oligonucleotide
ctggcggcaagttctg

SEQ ID NO: 1167 - DNA, 16 bp, Artificial sequence
  Synthetic oligonucleotide
gcaccagcaccgcgac

SEQ ID NO: 1168 - DNA, 16 bp, Artificial sequence
  Synthetic oligonucleotide
gaggtgctacagttct

SEQ ID NO: 1169 - DNA, 16 bp, Artificial sequence
  Synthetic oligonucleotide
cgcagcactcatcacg

SEQ ID NO: 1170 - DNA, 16 bp, Artificial sequence
  Synthetic oligonucleotide
actccgggtgcctcac

SEQ ID NO: 1171 - DNA, 16 bp, Artificial sequence
  Synthetic oligonucleotide
accgtaggagtaatcc

SEQ ID NO: 1172 - DNA, 16 bp, Artificial sequence
  Synthetic oligonucleotide
tatgtacgctcagagc

SEQ ID NO: 1173 - DNA, 16 bp, Artificial sequence
  Synthetic oligonucleotide
taggttttataaaccg

SEQ ID NO: 1174 - DNA, 16 bp, Artificial sequence
  Synthetic oligonucleotide
gtaaagttccttagct

SEQ ID NO: 1175 - DNA, 16 bp, Artificial sequence
  Synthetic oligonucleotide
gggaggtatcttcttt

SEQ ID NO: 1176 - DNA, 16 bp, Artificial sequence
  Synthetic oligonucleotide
gttggatgcactgggt

SEQ ID NO: 1177 - DNA, 16 bp, Artificial sequence
  Synthetic oligonucleotide
ttttgtccgtgtgcgc

SEQ ID NO: 1178 - DNA, 16 bp, Artificial sequence
  Synthetic oligonucleotide
gcaagtatgccaatgc

SEQ ID NO: 1179 - DNA, 16 bp, Artificial sequence
  Synthetic oligonucleotide
tagatgtgtgacgaag

SEQ ID NO: 1180 - DNA, 16 bp, Artificial sequence
  Synthetic oligonucleotide
tgggagtgatgaaggc

SEQ ID NO: 1181 - DNA, 16 bp, Artificial sequence
  Synthetic oligonucleotide
aactcacggtcccaag

SEQ ID NO: 1182 - DNA, 16 bp, Artificial sequence
  Synthetic oligonucleotide
caatacaagtcattgc

SEQ ID NO: 1183 - DNA, 16 bp, Artificial sequence
  Synthetic oligonucleotide
gccaaagctgcgctgc

SEQ ID NO: 1184 - DNA, 16 bp, Artificial sequence
  Synthetic oligonucleotide
aggcgcgcgcagaggg

SEQ ID NO: 1185 - DNA, 16 bp, Artificial sequence
  Synthetic oligonucleotide
gccgaacgcactgggc

SEQ ID NO: 1186 - DNA, 16 bp, Artificial sequence
  Synthetic oligonucleotide
cacatttgacttgagt

SEQ ID NO: 1187 - DNA, 16 bp, Artificial sequence
  Synthetic oligonucleotide
agctatattgatcttt

SEQ ID NO: 1188 - DNA, 16 bp, Artificial sequence
  Synthetic oligonucleotide
tgctgaccaggcttgc

SEQ ID NO: 1189 - DNA, 16 bp, Artificial sequence
  Synthetic oligonucleotide
ccgttatatgccaagc

SEQ ID NO: 1190 - DNA, 16 bp, Artificial sequence
  Synthetic oligonucleotide
ctggatagcatggtct

SEQ ID NO: 1191 - DNA, 16 bp, Artificial sequence
  Synthetic oligonucleotide
cgctttctggcaccct

SEQ ID NO: 1192 - DNA, 16 bp, Artificial sequence
  Synthetic oligonucleotide
agtaatgcggtcctcg

SEQ ID NO: 1193 - DNA, 16 bp, Artificial sequence
  Synthetic oligonucleotide
aggaacggtcctggcc

SEQ ID NO: 1194 - DNA, 16 bp, Artificial sequence
  Synthetic oligonucleotide
gcgcagggagcctccc

SEQ ID NO: 1195 - DNA, 16 bp, Artificial sequence
  Synthetic oligonucleotide
gtgaagatgcttgtaa

SEQ ID NO: 1196 - DNA, 16 bp, Artificial sequence
  Synthetic oligonucleotide
gctcatggagcacaaa

SEQ ID NO: 1197 - DNA, 16 bp, Artificial sequence
  Synthetic oligonucleotide
agcttagggttttgca

SEQ ID NO: 1198 - DNA, 16 bp, Artificial sequence
  Synthetic oligonucleotide
tactgaactggatcta

SEQ ID NO: 1199 - DNA, 16 bp, Artificial sequence
  Synthetic oligonucleotide
cttgtaaccaccaggt

SEQ ID NO: 1200 - DNA, 16 bp, Artificial sequence
  Synthetic oligonucleotide
ggtcctcacggaaagc

SEQ ID NO: 1201 - DNA, 16 bp, Artificial sequence
  Synthetic oligonucleotide
cctcatggcacgatgc

SEQ ID NO: 1202 - DNA, 16 bp, Artificial sequence
  Synthetic oligonucleotide
ccatatctatctcctg

SEQ ID NO: 1203 - DNA, 16 bp, Artificial sequence
  Synthetic oligonucleotide
gtatgattgggtatgg

SEQ ID NO: 1204 - DNA, 16 bp, Artificial sequence
  Synthetic oligonucleotide
gttcaggcaaactagt

SEQ ID NO: 1205 - DNA, 16 bp, Artificial sequence
  Synthetic oligonucleotide
tccccgagatgttcat

SEQ ID NO: 1206 - DNA, 16 bp, Artificial sequence
  Synthetic oligonucleotide
cctacttactactcaa

SEQ ID NO: 1207 - DNA, 16 bp, Artificial sequence
  Synthetic oligonucleotide
cccaaagcattgatct

SEQ ID NO: 1208 - DNA, 16 bp, Artificial sequence
  Synthetic oligonucleotide
atcaacatccacaacc

SEQ ID NO: 1209 - DNA, 16 bp, Artificial sequence
  Synthetic oligonucleotide
gccagaatgagcttac

SEQ ID NO: 1210 - DNA, 16 bp, Artificial sequence
  Synthetic oligonucleotide
cgttaacccctggcat

SEQ ID NO: 1211 - DNA, 16 bp, Artificial sequence
  Synthetic oligonucleotide
tcaggtcctacctcaa

SEQ ID NO: 1212 - DNA, 16 bp, Artificial sequence
  Synthetic oligonucleotide
acgggaaaggcagttg

SEQ ID NO: 1213 - DNA, 16 bp, Artificial sequence
  Synthetic oligonucleotide
tcaatgaactgcattc

SEQ ID NO: 1214 - DNA, 16 bp, Artificial sequence
  Synthetic oligonucleotide
agtatgaatgtcattc

SEQ ID NO: 1215 - DNA, 16 bp, Artificial sequence
  Synthetic oligonucleotide
ccccagcagatagtgg

SEQ ID NO: 1216 - DNA, 16 bp, Artificial sequence
  Synthetic oligonucleotide
atgattcgagttcaga

SEQ ID NO: 1217 - DNA, 16 bp, Artificial sequence
  Synthetic oligonucleotide
ttattgggttgtcata

SEQ ID NO: 1218 - DNA, 16 bp, Artificial sequence
  Synthetic oligonucleotide
ggtcaagaagcctttc

SEQ ID NO: 1219 - DNA, 16 bp, Artificial sequence
  Synthetic oligonucleotide
ctctagttcgcatcat

SEQ ID NO: 1220 - DNA, 16 bp, Artificial sequence
  Synthetic oligonucleotide
atgtaggctcaacata

SEQ ID NO: 1221 - DNA, 16 bp, Artificial sequence
  Synthetic oligonucleotide
attagaggatcaagga

SEQ ID NO: 1222 - DNA, 16 bp, Artificial sequence
  Synthetic oligonucleotide
ggtgttttcatgagcc

SEQ ID NO: 1223 - DNA, 16 bp, Artificial sequence
  Synthetic oligonucleotide
tgtgatcgccaaccac

SEQ ID NO: 1224 - DNA, 16 bp, Artificial sequence
  Synthetic oligonucleotide
ccacatggactttacc

SEQ ID NO: 1225 - DNA, 16 bp, Artificial sequence
  Synthetic oligonucleotide
gaagacacatacctga

SEQ ID NO: 1226 - DNA, 16 bp, Artificial sequence
  Synthetic oligonucleotide
cactacatctagctct

SEQ ID NO: 1227 - DNA, 16 bp, Artificial sequence
  Synthetic oligonucleotide
atccactgatgcaatg

SEQ ID NO: 1228 - DNA, 16 bp, Artificial sequence
  Synthetic oligonucleotide
gtgacttaagggttct

SEQ ID NO: 1229 - DNA, 16 bp, Artificial sequence
  Synthetic oligonucleotide
ggaaagatcctgcagc

SEQ ID NO: 1230 - DNA, 16 bp, Artificial sequence
  Synthetic oligonucleotide
gagataatgcagccct

SEQ ID NO: 1231 - DNA, 16 bp, Artificial sequence
  Synthetic oligonucleotide
aaccttacagtgggat

SEQ ID NO: 1232 - DNA, 16 bp, Artificial sequence
  Synthetic oligonucleotide
ctagaaagccacccat

SEQ ID NO: 1233 - DNA, 16 bp, Artificial sequence
  Synthetic oligonucleotide
tgctacccaaatgcag

SEQ ID NO: 1234 - DNA, 16 bp, Artificial sequence
  Synthetic oligonucleotide
ctctagatgtaccaag

SEQ ID NO: 1235 - DNA, 16 bp, Artificial sequence
  Synthetic oligonucleotide
tgtcatccagtagtca

SEQ ID NO: 1236 - DNA, 16 bp, Artificial sequence
  Synthetic oligonucleotide
tatcatcatgcaggca

SEQ ID NO: 1237 - DNA, 16 bp, Artificial sequence
  Synthetic oligonucleotide
gttaagcctgtcctcc

SEQ ID NO: 1238 - DNA, 16 bp, Artificial sequence
  Synthetic oligonucleotide
aaggatgcagccgaca

SEQ ID NO: 1239 - DNA, 16 bp, Artificial sequence
  Synthetic oligonucleotide
aaaggaggtagcacaa

SEQ ID NO: 1240 - DNA, 16 bp, Artificial sequence
  Synthetic oligonucleotide
tctggcggcaagttct

SEQ ID NO: 1241 - DNA, 16 bp, Artificial sequence
  Synthetic oligonucleotide
gacgaacagcagcacc

SEQ ID NO: 1242 - DNA, 16 bp, Artificial sequence
  Synthetic oligonucleotide
agaggtgctacagttc

SEQ ID NO: 1243 - DNA, 16 bp, Artificial sequence
  Synthetic oligonucleotide
gccgcagcactcatca

SEQ ID NO: 1244 - DNA, 16 bp, Artificial sequence
  Synthetic oligonucleotide
ccactccgggtgcctc

SEQ ID NO: 1245 - DNA, 16 bp, Artificial sequence
  Synthetic oligonucleotide
aaaccgtaggagtaat

SEQ ID NO: 1246 - DNA, 16 bp, Artificial sequence
  Synthetic oligonucleotide
ctatgtacgctcagag

SEQ ID NO: 1247 - DNA, 16 bp, Artificial sequence
  Synthetic oligonucleotide
tgatggtcaacataaa

SEQ ID NO: 1248 - DNA, 16 bp, Artificial sequence
  Synthetic oligonucleotide
aggatgtaaagttcct

SEQ ID NO: 1249 - DNA, 16 bp, Artificial sequence
  Synthetic oligonucleotide
gagggaggtatcttct

SEQ ID NO: 1250 - DNA, 16 bp, Artificial sequence
  Synthetic oligonucleotide
ctgttggatgcactgg

SEQ ID NO: 1251 - DNA, 16 bp, Artificial sequence
  Synthetic oligonucleotide
attttgtccgtgtgcg

SEQ ID NO: 1252 - DNA, 16 bp, Artificial sequence
  Synthetic oligonucleotide
agggcaagtatgccaa

SEQ ID NO: 1253 - DNA, 16 bp, Artificial sequence
  Synthetic oligonucleotide
ttagatgtgtgacgaa

SEQ ID NO: 1254 - DNA, 16 bp, Artificial sequence
  Synthetic oligonucleotide
tttccagtgagttgtt

SEQ ID NO: 1255 - DNA, 16 bp, Artificial sequence
  Synthetic oligonucleotide
accgtaagaaaaatgt

SEQ ID NO: 1256 - DNA, 16 bp, Artificial sequence
  Synthetic oligonucleotide
gaactcacggtcccaa

SEQ ID NO: 1257 - DNA, 16 bp, Artificial sequence
  Synthetic oligonucleotide
ccaatacaagtcattg

SEQ ID NO: 1258 - DNA, 16 bp, Artificial sequence
  Synthetic oligonucleotide
gccgccaaagctgcgc

SEQ ID NO: 1259 - DNA, 16 bp, Artificial sequence
  Synthetic oligonucleotide
gaggcgcgcgcagagg

SEQ ID NO: 1260 - DNA, 16 bp, Artificial sequence
  Synthetic oligonucleotide
ggccgaacgcactggg

SEQ ID NO: 1261 - DNA, 16 bp, Artificial sequence
  Synthetic oligonucleotide
acacatttgacttgag

SEQ ID NO: 1262 - DNA, 16 bp, Artificial sequence
  Synthetic oligonucleotide
tagctatattgatctt

SEQ ID NO: 1263 - DNA, 16 bp, Artificial sequence
  Synthetic oligonucleotide
aggtaaacccaaccca

SEQ ID NO: 1264 - DNA, 16 bp, Artificial sequence
  Synthetic oligonucleotide
gcatttacagtgcccg

SEQ ID NO: 1265 - DNA, 16 bp, Artificial sequence
  Synthetic oligonucleotide
ggccgactactggata

SEQ ID NO: 1266 - DNA, 16 bp, Artificial sequence
  Synthetic oligonucleotide
ctgcgctgcgctttct

SEQ ID NO: 1267 - DNA, 16 bp, Artificial sequence
  Synthetic oligonucleotide
ggcaggacatttatcc

SEQ ID NO: 1268 - DNA, 16 bp, Artificial sequence
  Synthetic oligonucleotide
ccgcattccgtttgtc

SEQ ID NO: 1269 - DNA, 16 bp, Artificial sequence
  Synthetic oligonucleotide
cgcttggttcctatca

SEQ ID NO: 1270 - DNA, 16 bp, Artificial sequence
  Synthetic oligonucleotide
tggagatactgtgaag

SEQ ID NO: 1271 - DNA, 16 bp, Artificial sequence
  Synthetic oligonucleotide
gacaagctcatggagc

SEQ ID NO: 1272 - DNA, 16 bp, Artificial sequence
  Synthetic oligonucleotide
ggcttagcttagggtt

SEQ ID NO: 1273 - DNA, 16 bp, Artificial sequence
  Synthetic oligonucleotide
ggattatgcaaagcca

SEQ ID NO: 1274 - DNA, 16 bp, Artificial sequence
  Synthetic oligonucleotide
cactacttgtaaccac

SEQ ID NO: 1275 - DNA, 16 bp, Artificial sequence
  Synthetic oligonucleotide
gtgcagtgtccagatg

SEQ ID NO: 1276 - DNA, 16 bp, Artificial sequence
  Synthetic oligonucleotide
tgttagactgcctcat

SEQ ID NO: 1277 - DNA, 16 bp, Artificial sequence
  Synthetic oligonucleotide
agggagtgattcaccc

SEQ ID NO: 1278 - DNA, 16 bp, Artificial sequence
  Synthetic oligonucleotide
aactgagctattgcaa

SEQ ID NO: 1279 - DNA, 16 bp, Artificial sequence
  Synthetic oligonucleotide
agaaagggttcaggca

SEQ ID NO: 1280 - DNA, 16 bp, Artificial sequence
  Synthetic oligonucleotide
ctccccgagatgttca

SEQ ID NO: 1281 - DNA, 16 bp, Artificial sequence
  Synthetic oligonucleotide
gcagagggaacctact

SEQ ID NO: 1282 - DNA, 16 bp, Artificial sequence
  Synthetic oligonucleotide
gcgatgataggagacc

SEQ ID NO: 1283 - DNA, 16 bp, Artificial sequence
  Synthetic oligonucleotide
gacctgaccacagtca

SEQ ID NO: 1284 - DNA, 16 bp, Artificial sequence
  Synthetic oligonucleotide
ctggactatgaccaca

SEQ ID NO: 1285 - DNA, 16 bp, Artificial sequence
  Synthetic oligonucleotide
gacaatatctcctggc

SEQ ID NO: 1286 - DNA, 16 bp, Artificial sequence
  Synthetic oligonucleotide
aggtcctacctcaact

SEQ ID NO: 1287 - DNA, 16 bp, Artificial sequence
  Synthetic oligonucleotide
ccatagaaaatgacgg

SEQ ID NO: 1288 - DNA, 16 bp, Artificial sequence
  Synthetic oligonucleotide
cagtatgaatgtcatt

SEQ ID NO: 1289 - DNA, 16 bp, Artificial sequence
  Synthetic oligonucleotide
acccagacctagctcc

SEQ ID NO: 1290 - DNA, 16 bp, Artificial sequence
  Synthetic oligonucleotide
aacaagtcagctgtac

SEQ ID NO: 1291 - DNA, 16 bp, Artificial sequence
  Synthetic oligonucleotide
cgtacttgaggcacta

SEQ ID NO: 1292 - DNA, 16 bp, Artificial sequence
  Synthetic oligonucleotide
tgcaacgaagaagagt

SEQ ID NO: 1293 - DNA, 16 bp, Artificial sequence
  Synthetic oligonucleotide
ggctattcatttggta

SEQ ID NO: 1294 - DNA, 16 bp, Artificial sequence
  Synthetic oligonucleotide
gaaatgatgtaggctc

SEQ ID NO: 1295 - DNA, 16 bp, Artificial sequence
  Synthetic oligonucleotide
ccccattacaattgag

SEQ ID NO: 1296 - DNA, 16 bp, Artificial sequence
  Synthetic oligonucleotide
aggtgttttcatgagc

SEQ ID NO: 1297 - DNA, 16 bp, Artificial sequence
  Synthetic oligonucleotide
acagagcggtgtgtga

SEQ ID NO: 1298 - DNA, 16 bp, Artificial sequence
  Synthetic oligonucleotide
atgcaccccgcttcca

SEQ ID NO: 1299 - DNA, 16 bp, Artificial sequence
  Synthetic oligonucleotide
cctattggtggaagac

SEQ ID NO: 1300 - DNA, 16 bp, Artificial sequence
  Synthetic oligonucleotide
tgaatttggaccacag

SEQ ID NO: 1301 - DNA, 16 bp, Artificial sequence
  Synthetic oligonucleotide
gggcatatccactgat

SEQ ID NO: 1302 - DNA, 16 bp, Artificial sequence
  Synthetic oligonucleotide
catgagtgacttaagg

SEQ ID NO: 1303 - DNA, 16 bp, Artificial sequence
  Synthetic oligonucleotide
ctcagaattagtggaa

SEQ ID NO: 1304 - DNA, 16 bp, Artificial sequence
  Synthetic oligonucleotide
gtgcagagataatgca

SEQ ID NO: 1305 - DNA, 16 bp, Artificial sequence
  Synthetic oligonucleotide
gtccagacgcaggatc

SEQ ID NO: 1306 - DNA, 16 bp, Artificial sequence
  Synthetic oligonucleotide
gaccattgctgcctag

SEQ ID NO: 1307 - DNA, 16 bp, Artificial sequence
  Synthetic oligonucleotide
gcctacggaggatgct

SEQ ID NO: 1308 - DNA, 16 bp, Artificial sequence
  Synthetic oligonucleotide
ttgcatgcgggccctg

SEQ ID NO: 1309 - DNA, 16 bp, Artificial sequence
  Synthetic oligonucleotide
cccaagacagttaatg

SEQ ID NO: 1310 - DNA, 16 bp, Artificial sequence
  Synthetic oligonucleotide
gggcaggacaacactt

SEQ ID NO: 1311 - DNA, 16 bp, Artificial sequence
  Synthetic oligonucleotide
cgccacatgaaccacc

SEQ ID NO: 1312 - DNA, 16 bp, Artificial sequence
  Synthetic oligonucleotide
tgcctatgggcactgc

SEQ ID NO: 1313 - DNA, 16 bp, Artificial sequence
  Synthetic oligonucleotide
gacaattgctgggtag

SEQ ID NO: 1314 - DNA, 16 bp, Artificial sequence
  Synthetic oligonucleotide
gctaactttgatacag

SEQ ID NO: 1315 - DNA, 16 bp, Artificial sequence
  Synthetic oligonucleotide
ttctggcggcaagttc

SEQ ID NO: 1316 - DNA, 16 bp, Artificial sequence
  Synthetic oligonucleotide
gagacgaacagcagca

SEQ ID NO: 1317 - DNA, 16 bp, Artificial sequence
  Synthetic oligonucleotide
aagaggtgctacagtt

SEQ ID NO: 1318 - DNA, 16 bp, Artificial sequence
  Synthetic oligonucleotide
ggccgcagcactcatc

SEQ ID NO: 1319 - DNA, 16 bp, Artificial sequence
  Synthetic oligonucleotide
gccactccgggtgcct

SEQ ID NO: 1320 - DNA, 16 bp, Artificial sequence
  Synthetic oligonucleotide
gaaaccgtaggagtaa

SEQ ID NO: 1321 - DNA, 16 bp, Artificial sequence
  Synthetic oligonucleotide
cctatgtacgctcaga

SEQ ID NO: 1322 - DNA, 16 bp, Artificial sequence
  Synthetic oligonucleotide
ggctgatggtcaacat

SEQ ID NO: 1323 - DNA, 16 bp, Artificial sequence
  Synthetic oligonucleotide
ttaggatgtaaagttc

SEQ ID NO: 1324 - DNA, 16 bp, Artificial sequence
  Synthetic oligonucleotide
ggagggaggtatcttc

SEQ ID NO: 1325 - DNA, 16 bp, Artificial sequence
  Synthetic oligonucleotide
tctgttggatgcactg

SEQ ID NO: 1326 - DNA, 16 bp, Artificial sequence
  Synthetic oligonucleotide
tgcaagggctccagtt

SEQ ID NO: 1327 - DNA, 16 bp, Artificial sequence
  Synthetic oligonucleotide
aagggcaagtatgcca

SEQ ID NO: 1328 - DNA, 16 bp, Artificial sequence
  Synthetic oligonucleotide
atttagatgtgtgacg

SEQ ID NO: 1329 - DNA, 16 bp, Artificial sequence
  Synthetic oligonucleotide
tctatcttatgttgta

SEQ ID NO: 1330 - DNA, 16 bp, Artificial sequence
  Synthetic oligonucleotide
cgaccgtaagaaaaat

SEQ ID NO: 1331 - DNA, 16 bp, Artificial sequence
  Synthetic oligonucleotide
ggaactcacggtccca

SEQ ID NO: 1332 - DNA, 16 bp, Artificial sequence
  Synthetic oligonucleotide
gggcaccatatataca

SEQ ID NO: 1333 - DNA, 16 bp, Artificial sequence
  Synthetic oligonucleotide
cgccgccaaagctgcg

SEQ ID NO: 1334 - DNA, 16 bp, Artificial sequence
  Synthetic oligonucleotide
ggaggcgcgcgcagag

SEQ ID NO: 1335 - DNA, 16 bp, Artificial sequence
  Synthetic oligonucleotide
gaggccgaacgcactg

SEQ ID NO: 1336 - DNA, 16 bp, Artificial sequence
  Synthetic oligonucleotide
cggtaaccacacattt

SEQ ID NO: 1337 - DNA, 16 bp, Artificial sequence
  Synthetic oligonucleotide
ctatagctatattgat

SEQ ID NO: 1338 - DNA, 16 bp, Artificial sequence
  Synthetic oligonucleotide
tgccagacaggtaaac

SEQ ID NO: 1339 - DNA, 16 bp, Artificial sequence
  Synthetic oligonucleotide
catagaagctcatcac

SEQ ID NO: 1340 - DNA, 16 bp, Artificial sequence
  Synthetic oligonucleotide
gatctagcgggctcct

SEQ ID NO: 1341 - DNA, 16 bp, Artificial sequence
  Synthetic oligonucleotide
gccaaagccccgcgcc

SEQ ID NO: 1342 - DNA, 16 bp, Artificial sequence
  Synthetic oligonucleotide
tttcagccggtcagag

SEQ ID NO: 1343 - DNA, 16 bp, Artificial sequence
  Synthetic oligonucleotide
cggcgaggaggctggt

SEQ ID NO: 1344 - DNA, 16 bp, Artificial sequence
  Synthetic oligonucleotide
gctaacccagcccagc

SEQ ID NO: 1345 - DNA, 16 bp, Artificial sequence
  Synthetic oligonucleotide
gtctgatatcatcatc

SEQ ID NO: 1346 - DNA, 16 bp, Artificial sequence
  Synthetic oligonucleotide
gcaacgacattctggc

SEQ ID NO: 1347 - DNA, 16 bp, Artificial sequence
  Synthetic oligonucleotide
cccaaggcttagctta

SEQ ID NO: 1348 - DNA, 16 bp, Artificial sequence
  Synthetic oligonucleotide
gcaactggattatgca

SEQ ID NO: 1349 - DNA, 16 bp, Artificial sequence
  Synthetic oligonucleotide
cccttttcgggctgag

SEQ ID NO: 1350 - DNA, 16 bp, Artificial sequence
  Synthetic oligonucleotide
tgttcaggtgcagtgt

SEQ ID NO: 1351 - DNA, 16 bp, Artificial sequence
  Synthetic oligonucleotide
cctagatgttagactg

SEQ ID NO: 1352 - DNA, 16 bp, Artificial sequence
  Synthetic oligonucleotide
gatcagattctacctc

SEQ ID NO: 1353 - DNA, 16 bp, Artificial sequence
  Synthetic oligonucleotide
tggaactgcatagggc

SEQ ID NO: 1354 - DNA, 16 bp, Artificial sequence
  Synthetic oligonucleotide
ccaatgaacggcctct

SEQ ID NO: 1355 - DNA, 16 bp, Artificial sequence
  Synthetic oligonucleotide
cctccccgagatgttc

SEQ ID NO: 1356 - DNA, 16 bp, Artificial sequence
  Synthetic oligonucleotide
cgccatggaccctgcg

SEQ ID NO: 1357 - DNA, 16 bp, Artificial sequence
  Synthetic oligonucleotide
ttgaagacagcgatga

SEQ ID NO: 1358 - DNA, 16 bp, Artificial sequence
  Synthetic oligonucleotide
gatgactccgggtccc

SEQ ID NO: 1359 - DNA, 16 bp, Artificial sequence
  Synthetic oligonucleotide
catcatgtccagtctg

SEQ ID NO: 1360 - DNA, 16 bp, Artificial sequence
  Synthetic oligonucleotide
gcccagccgaggtaat

SEQ ID NO: 1361 - DNA, 16 bp, Artificial sequence
  Synthetic oligonucleotide
caggtcctacctcaac

SEQ ID NO: 1362 - DNA, 16 bp, Artificial sequence
  Synthetic oligonucleotide
gaagagctcacttaaa

SEQ ID NO: 1363 - DNA, 16 bp, Artificial sequence
  Synthetic oligonucleotide
gtcaaggtattccagc

SEQ ID NO: 1364 - DNA, 16 bp, Artificial sequence
  Synthetic oligonucleotide
tcagtatgaatgtcat

SEQ ID NO: 1365 - DNA, 16 bp, Artificial sequence
  Synthetic oligonucleotide
tgacatgggccgtggc

SEQ ID NO: 1366 - DNA, 16 bp, Artificial sequence
  Synthetic oligonucleotide
gcaagctattatctgc

SEQ ID NO: 1367 - DNA, 16 bp, Artificial sequence
  Synthetic oligonucleotide
gcccacctaacttgcc

SEQ ID NO: 1368 - DNA, 16 bp, Artificial sequence
  Synthetic oligonucleotide
caggaactactgttgc

SEQ ID NO: 1369 - DNA, 16 bp, Artificial sequence
  Synthetic oligonucleotide
atacatagtgttggct

SEQ ID NO: 1370 - DNA, 16 bp, Artificial sequence
  Synthetic oligonucleotide
actgactataagggca

SEQ ID NO: 1371 - DNA, 16 bp, Artificial sequence
  Synthetic oligonucleotide
aattttagtcccaacc

SEQ ID NO: 1372 - DNA, 16 bp, Artificial sequence
  Synthetic oligonucleotide
gaggtgttttcatgag

SEQ ID NO: 1373 - DNA, 16 bp, Artificial sequence
  Synthetic oligonucleotide
gatcatggccattagc

SEQ ID NO: 1374 - DNA, 16 bp, Artificial sequence
  Synthetic oligonucleotide
ccgcagacttggatgc

SEQ ID NO: 1375 - DNA, 16 bp, Artificial sequence
  Synthetic oligonucleotide
cactacctattggtgg

SEQ ID NO: 1376 - DNA, 16 bp, Artificial sequence
  Synthetic oligonucleotide
acctagacatactctg

SEQ ID NO: 1377 - DNA, 16 bp, Artificial sequence
  Synthetic oligonucleotide
atcttgagggcatatc

SEQ ID NO: 1378 - DNA, 16 bp, Artificial sequence
  Synthetic oligonucleotide
agttacatgagtgact

SEQ ID NO: 1379 - DNA, 16 bp, Artificial sequence
  Synthetic oligonucleotide
tcctaactctttcagt

SEQ ID NO: 1380 - DNA, 16 bp, Artificial sequence
  Synthetic oligonucleotide
tgccatccataaagat

SEQ ID NO: 1381 - DNA, 16 bp, Artificial sequence
  Synthetic oligonucleotide
ccaaagtccagacgca

SEQ ID NO: 1382 - DNA, 16 bp, Artificial sequence
  Synthetic oligonucleotide
ccaaatgaccattgct

SEQ ID NO: 1383 - DNA, 16 bp, Artificial sequence
  Synthetic oligonucleotide
cgtaatgcctacggag

SEQ ID NO: 1384 - DNA, 16 bp, Artificial sequence
  Synthetic oligonucleotide
gcctattgcatgcggg

SEQ ID NO: 1385 - DNA, 16 bp, Artificial sequence
  Synthetic oligonucleotide
tgcaacccaagacagt

SEQ ID NO: 1386 - DNA, 16 bp, Artificial sequence
  Synthetic oligonucleotide
taacagagtgctagca

SEQ ID NO: 1387 - DNA, 16 bp, Artificial sequence
  Synthetic oligonucleotide
gggaatacgccacatg

SEQ ID NO: 1388 - DNA, 16 bp, Artificial sequence
  Synthetic oligonucleotide
agcaatgcctatgggc

SEQ ID NO: 1389 - DNA, 16 bp, Artificial sequence
  Synthetic oligonucleotide
ccggatgctgacaatt

SEQ ID NO: 1390 - DNA, 16 bp, Artificial sequence
  Synthetic oligonucleotide
cattctggcggcaagt

SEQ ID NO: 1391 - DNA, 16 bp, Artificial sequence
  Synthetic oligonucleotide
ccattggctgacgatc

SEQ ID NO: 1392 - DNA, 16 bp, Artificial sequence
  Synthetic oligonucleotide
agtggtggacatttcc

SEQ ID NO: 1393 - DNA, 16 bp, Artificial sequence
  Synthetic oligonucleotide
atggccgcagcactca

SEQ ID NO: 1394 - DNA, 16 bp, Artificial sequence
  Synthetic oligonucleotide
tgccactccgggtgcc

SEQ ID NO: 1395 - DNA, 16 bp, Artificial sequence
  Synthetic oligonucleotide
cgaaaccgtaggagta

SEQ ID NO: 1396 - DNA, 16 bp, Artificial sequence
  Synthetic oligonucleotide
ttccctatgtacgctc

SEQ ID NO: 1397 - DNA, 16 bp, Artificial sequence
  Synthetic oligonucleotide
acgaggctgatggtca

SEQ ID NO: 1398 - DNA, 16 bp, Artificial sequence
  Synthetic oligonucleotide
actgttaggatgtaaa

SEQ ID NO: 1399 - DNA, 16 bp, Artificial sequence
  Synthetic oligonucleotide
atgaggtggactggga

SEQ ID NO: 1400 - DNA, 16 bp, Artificial sequence
  Synthetic oligonucleotide
ttctgttggatgcact

SEQ ID NO: 1401 - DNA, 16 bp, Artificial sequence
  Synthetic oligonucleotide
tttgcaagggctccag

SEQ ID NO: 1402 - DNA, 16 bp, Artificial sequence
  Synthetic oligonucleotide
taagggcaagtatgcc

SEQ ID NO: 1403 - DNA, 16 bp, Artificial sequence
  Synthetic oligonucleotide
catttagatgtgtgac

SEQ ID NO: 1404 - DNA, 16 bp, Artificial sequence
  Synthetic oligonucleotide
aggtctccattctatc

SEQ ID NO: 1405 - DNA, 16 bp, Artificial sequence
  Synthetic oligonucleotide
tccgaccgtaagaaaa

SEQ ID NO: 1406 - DNA, 16 bp, Artificial sequence
  Synthetic oligonucleotide
gctctaggaactcacg

SEQ ID NO: 1407 - DNA, 16 bp, Artificial sequence
  Synthetic oligonucleotide
agggcaccatatatac

SEQ ID NO: 1408 - DNA, 16 bp, Artificial sequence
  Synthetic oligonucleotide
gcgccgccaaagctgc

SEQ ID NO: 1409 - DNA, 16 bp, Artificial sequence
  Synthetic oligonucleotide
cggaggcgcgcgcaga

SEQ ID NO: 1410 - DNA, 16 bp, Artificial sequence
  Synthetic oligonucleotide
tgaggccgaacgcact

SEQ ID NO: 1411 - DNA, 16 bp, Artificial sequence
  Synthetic oligonucleotide
ccggtaaccacacatt

SEQ ID NO: 1412 - DNA, 16 bp, Artificial sequence
  Synthetic oligonucleotide
tctatagctatattga

SEQ ID NO: 1413 - DNA, 16 bp, Artificial sequence
  Synthetic oligonucleotide
caccatatactgccag

SEQ ID NO: 1414 - DNA, 16 bp, Artificial sequence
  Synthetic oligonucleotide
gtgtactgtgtcatag

SEQ ID NO: 1415 - DNA, 16 bp, Artificial sequence
  Synthetic oligonucleotide
acctacgaagcatgcc

SEQ ID NO: 1416 - DNA, 16 bp, Artificial sequence
  Synthetic oligonucleotide
cccattggagggaaac

SEQ ID NO: 1417 - DNA, 16 bp, Artificial sequence
  Synthetic oligonucleotide
ccgagaatttcagccg

SEQ ID NO: 1418 - DNA, 16 bp, Artificial sequence
  Synthetic oligonucleotide
ggagacagcggcgagg

SEQ ID NO: 1419 - DNA, 16 bp, Artificial sequence
  Synthetic oligonucleotide
aaatagagacctgcgc

SEQ ID NO: 1420 - DNA, 16 bp, Artificial sequence
  Synthetic oligonucleotide
tcctatcagtctgata

SEQ ID NO: 1421 - DNA, 16 bp, Artificial sequence
  Synthetic oligonucleotide
ccccagcgagatcacc

SEQ ID NO: 1422 - DNA, 16 bp, Artificial sequence
  Synthetic oligonucleotide
ctggattaaggacccc

SEQ ID NO: 1423 - DNA, 16 bp, Artificial sequence
  Synthetic oligonucleotide
gtccagcaaagcaact

SEQ ID NO: 1424 - DNA, 16 bp, Artificial sequence
  Synthetic oligonucleotide
gtccaggattctgtgc

SEQ ID NO: 1425 - DNA, 16 bp, Artificial sequence
  Synthetic oligonucleotide
gattaagcctgagtgg

SEQ ID NO: 1426 - DNA, 16 bp, Artificial sequence
  Synthetic oligonucleotide
cacaacctagatgtta

SEQ ID NO: 1427 - DNA, 16 bp, Artificial sequence
  Synthetic oligonucleotide
acttaaatcctgccca

SEQ ID NO: 1428 - DNA, 16 bp, Artificial sequence
  Synthetic oligonucleotide
ggacttatggaactgc

SEQ ID NO: 1429 - DNA, 16 bp, Artificial sequence
  Synthetic oligonucleotide
taagaccaatgaacgg

SEQ ID NO: 1430 - DNA, 16 bp, Artificial sequence
  Synthetic oligonucleotide
acctccccgagatgtt

SEQ ID NO: 1431 - DNA, 16 bp, Artificial sequence
  Synthetic oligonucleotide
cctcattcaaagcgac

SEQ ID NO: 1432 - DNA, 16 bp, Artificial sequence
  Synthetic oligonucleotide
aacaagtctgggatcg

SEQ ID NO: 1433 - DNA, 16 bp, Artificial sequence
  Synthetic oligonucleotide
ggctcgatgggatagg

SEQ ID NO: 1434 - DNA, 16 bp, Artificial sequence
  Synthetic oligonucleotide
ccctagctaagccacc

SEQ ID NO: 1435 - DNA, 16 bp, Artificial sequence
  Synthetic oligonucleotide
gggtttaacaaggtaa

SEQ ID NO: 1436 - DNA, 16 bp, Artificial sequence
  Synthetic oligonucleotide
gcaggtcctacctcaa

SEQ ID NO: 1437 - DNA, 16 bp, Artificial sequence
  Synthetic oligonucleotide
cggatttatcaggaga

SEQ ID NO: 1438 - DNA, 16 bp, Artificial sequence
  Synthetic oligonucleotide
gaaggaatcttcatgt

SEQ ID NO: 1439 - DNA, 16 bp, Artificial sequence
  Synthetic oligonucleotide
ctcagtatgaatgtca

SEQ ID NO: 1440 - DNA, 16 bp, Artificial sequence
  Synthetic oligonucleotide
ccggtataagagctgc

SEQ ID NO: 1441 - DNA, 16 bp, Artificial sequence
  Synthetic oligonucleotide
tcgacatgcaagctat

SEQ ID NO: 1442 - DNA, 16 bp, Artificial sequence
  Synthetic oligonucleotide
gttaggacagcccagg

SEQ ID NO: 1443 - DNA, 16 bp, Artificial sequence
  Synthetic oligonucleotide
tgtcagtgggttcccc

SEQ ID NO: 1444 - DNA, 16 bp, Artificial sequence
  Synthetic oligonucleotide
tggaagcatacatgta

SEQ ID NO: 1445 - DNA, 16 bp, Artificial sequence
  Synthetic oligonucleotide
cacacatgggacagct

SEQ ID NO: 1446 - DNA, 16 bp, Artificial sequence
  Synthetic oligonucleotide
actacgagacctcaca

SEQ ID NO: 1447 - DNA, 16 bp, Artificial sequence
  Synthetic oligonucleotide
tccagaggtgttttca

SEQ ID NO: 1448 - DNA, 16 bp, Artificial sequence
  Synthetic oligonucleotide
ggacaacccgtatttt

SEQ ID NO: 1449 - DNA, 16 bp, Artificial sequence
  Synthetic oligonucleotide
aatcattccgcagact

SEQ ID NO: 1450 - DNA, 16 bp, Artificial sequence
  Synthetic oligonucleotide
gcccagtagaatctag

SEQ ID NO: 1451 - DNA, 16 bp, Artificial sequence
  Synthetic oligonucleotide
attgagaacatctccc

SEQ ID NO: 1452 - DNA, 16 bp, Artificial sequence
  Synthetic oligonucleotide
atattatcttgagggc

SEQ ID NO: 1453 - DNA, 16 bp, Artificial sequence
  Synthetic oligonucleotide
cgcaatacctaggaga

SEQ ID NO: 1454 - DNA, 16 bp, Artificial sequence
  Synthetic oligonucleotide
ctccaaatagagttcc

SEQ ID NO: 1455 - DNA, 16 bp, Artificial sequence
  Synthetic oligonucleotide
agctgatgtgtgccat

SEQ ID NO: 1456 - DNA, 16 bp, Artificial sequence
  Synthetic oligonucleotide
tggctataggttctga

SEQ ID NO: 1457 - DNA, 16 bp, Artificial sequence
  Synthetic oligonucleotide
cagtatccaaatgacc

SEQ ID NO: 1458 - DNA, 16 bp, Artificial sequence
  Synthetic oligonucleotide
gggttagtgagtcaag

SEQ ID NO: 1459 - DNA, 16 bp, Artificial sequence
  Synthetic oligonucleotide
tcccagtacatcctta

SEQ ID NO: 1460 - DNA, 16 bp, Artificial sequence
  Synthetic oligonucleotide
gcaatagatgtaccct

SEQ ID NO: 1461 - DNA, 16 bp, Artificial sequence
  Synthetic oligonucleotide
actgaagttgtctctt

SEQ ID NO: 1462 - DNA, 16 bp, Artificial sequence
  Synthetic oligonucleotide
cagaagtgggaatacg

SEQ ID NO: 1463 - DNA, 16 bp, Artificial sequence
  Synthetic oligonucleotide
gccacataccaggtga

SEQ ID NO: 1464 - DNA, 16 bp, Artificial sequence
  Synthetic oligonucleotide
cgccaccccggatgct

SEQ ID NO: 1465 - DNA, 16 bp, Artificial sequence
  Synthetic oligonucleotide
ttattcaggtctccat

SEQ ID NO: 1466 - DNA, 16 bp, Artificial sequence
  Synthetic oligonucleotide
gcattctggcggcaag

SEQ ID NO: 1467 - DNA, 16 bp, Artificial sequence
  Synthetic oligonucleotide
tccattggctgacgat

SEQ ID NO: 1468 - DNA, 16 bp, Artificial sequence
  Synthetic oligonucleotide
cagtggtggacatttc

SEQ ID NO: 1469 - DNA, 16 bp, Artificial sequence
  Synthetic oligonucleotide
gatggccgcagcactc

SEQ ID NO: 1470 - DNA, 16 bp, Artificial sequence
  Synthetic oligonucleotide
atgccactccgggtgc

SEQ ID NO: 1471 - DNA, 16 bp, Artificial sequence
  Synthetic oligonucleotide
ggcgaaaccgtaggag

SEQ ID NO: 1472 - DNA, 16 bp, Artificial sequence
  Synthetic oligonucleotide
cttccctatgtacgct

SEQ ID NO: 1473 - DNA, 16 bp, Artificial sequence
  Synthetic oligonucleotide
acacgaggctgatggt

SEQ ID NO: 1474 - DNA, 16 bp, Artificial sequence
  Synthetic oligonucleotide
tactgttaggatgtaa

SEQ ID NO: 1475 - DNA, 16 bp, Artificial sequence
  Synthetic oligonucleotide
aaatgaggtggactgg

SEQ ID NO: 1476 - DNA, 16 bp, Artificial sequence
  Synthetic oligonucleotide
gcggctgtttctgttg

SEQ ID NO: 1477 - DNA, 16 bp, Artificial sequence
  Synthetic oligonucleotide
ttttgcaagggctcca

SEQ ID NO: 1478 - DNA, 16 bp, Artificial sequence
  Synthetic oligonucleotide
tgtaagggcaagtatg

SEQ ID NO: 1479 - DNA, 16 bp, Artificial sequence
  Synthetic oligonucleotide
tcatttagatgtgtga

SEQ ID NO: 1480 - DNA, 16 bp, Artificial sequence
  Synthetic oligonucleotide
gctccgaccgtaagaa

SEQ ID NO: 1481 - DNA, 16 bp, Artificial sequence
  Synthetic oligonucleotide
caagctctaggaactc

SEQ ID NO: 1482 - DNA, 16 bp, Artificial sequence
  Synthetic oligonucleotide
agaagggcaccatata

SEQ ID NO: 1483 - DNA, 16 bp, Artificial sequence
  Synthetic oligonucleotide
ggctccgctgctggcg

SEQ ID NO: 1484 - DNA, 16 bp, Artificial sequence
  Synthetic oligonucleotide
gacggaggcgcgcgca

SEQ ID NO: 1485 - DNA, 16 bp, Artificial sequence
  Synthetic oligonucleotide
gtgaggccgaacgcac

SEQ ID NO: 1486 - DNA, 16 bp, Artificial sequence
  Synthetic oligonucleotide
cccggtaaccacacat

SEQ ID NO: 1487 - DNA, 16 bp, Artificial sequence
  Synthetic oligonucleotide
tgctctatagctatat

SEQ ID NO: 1488 - DNA, 16 bp, Artificial sequence
  Synthetic oligonucleotide
agccacaccatatact

SEQ ID NO: 1489 - DNA, 16 bp, Artificial sequence
  Synthetic oligonucleotide
ctctagtgtactgtgt

SEQ ID NO: 1490 - DNA, 16 bp, Artificial sequence
  Synthetic oligonucleotide
cgctattactgtctgc

SEQ ID NO: 1491 - DNA, 16 bp, Artificial sequence
  Synthetic oligonucleotide
ccataaaggctctcct

SEQ ID NO: 1492 - DNA, 16 bp, Artificial sequence
  Synthetic oligonucleotide
taaaaggctgagtccg

SEQ ID NO: 1493 - DNA, 16 bp, Artificial sequence
  Synthetic oligonucleotide
gcccagatttccgtct

SEQ ID NO: 1494 - DNA, 16 bp, Artificial sequence
  Synthetic oligonucleotide
tctgaagttacttggc

SEQ ID NO: 1495 - DNA, 16 bp, Artificial sequence
  Synthetic oligonucleotide
gtttatagctcctatc

SEQ ID NO: 1496 - DNA, 16 bp, Artificial sequence
  Synthetic oligonucleotide
agcttccccagcgaga

SEQ ID NO: 1497 - DNA, 16 bp, Artificial sequence
  Synthetic oligonucleotide
atacgatcttctggat

SEQ ID NO: 1498 - DNA, 16 bp, Artificial sequence
  Synthetic oligonucleotide
gggtactgagctgtaa

SEQ ID NO: 1499 - DNA, 16 bp, Artificial sequence
  Synthetic oligonucleotide
tttaacacgcctgcca

SEQ ID NO: 1500 - DNA, 16 bp, Artificial sequence
  Synthetic oligonucleotide
gataaccactactggg

SEQ ID NO: 1501 - DNA, 16 bp, Artificial sequence
  Synthetic oligonucleotide
tcaaactacacaacct

SEQ ID NO: 1502 - DNA, 16 bp, Artificial sequence
  Synthetic oligonucleotide
ccttaccttaggtcac

SEQ ID NO: 1503 - DNA, 16 bp, Artificial sequence
  Synthetic oligonucleotide
ataactgggacttatg

SEQ ID NO: 1504 - DNA, 16 bp, Artificial sequence
  Synthetic oligonucleotide
ttccgatgggccttgt

SEQ ID NO: 1505 - DNA, 16 bp, Artificial sequence
  Synthetic oligonucleotide
atggaacctccccgag

SEQ ID NO: 1506 - DNA, 16 bp, Artificial sequence
  Synthetic oligonucleotide
ttccagattgtatgag

SEQ ID NO: 1507 - DNA, 16 bp, Artificial sequence
  Synthetic oligonucleotide
ggaaattgtctggtgt

SEQ ID NO: 1508 - DNA, 16 bp, Artificial sequence
  Synthetic oligonucleotide
tggtaggcatattgca

SEQ ID NO: 1509 - DNA, 16 bp, Artificial sequence
  Synthetic oligonucleotide
tgtcatgagacctgtt

SEQ ID NO: 1510 - DNA, 16 bp, Artificial sequence
  Synthetic oligonucleotide
cagcacatcaggcatg

SEQ ID NO: 1511 - DNA, 16 bp, Artificial sequence
  Synthetic oligonucleotide
tgcaggtcctacctca

SEQ ID NO: 1512 - DNA, 16 bp, Artificial sequence
  Synthetic oligonucleotide
gatcaaagcctgctta

SEQ ID NO: 1513 - DNA, 16 bp, Artificial sequence
  Synthetic oligonucleotide
gggcacaaactgctca

SEQ ID NO: 1514 - DNA, 16 bp, Artificial sequence
  Synthetic oligonucleotide
tctcagtatgaatgtc

SEQ ID NO: 1515 - DNA, 16 bp, Artificial sequence
  Synthetic oligonucleotide
ctgagagtgtccggta

SEQ ID NO: 1516 - DNA, 16 bp, Artificial sequence
  Synthetic oligonucleotide
tggattcgacatgcaa

SEQ ID NO: 1517 - DNA, 16 bp, Artificial sequence
  Synthetic oligonucleotide
aggtaagggtcccgtg

SEQ ID NO: 1518 - DNA, 16 bp, Artificial sequence
  Synthetic oligonucleotide
attgatgtcagtgggt

SEQ ID NO: 1519 - DNA, 16 bp, Artificial sequence
  Synthetic oligonucleotide
gactttggaagcatac

SEQ ID NO: 1520 - DNA, 16 bp, Artificial sequence
  Synthetic oligonucleotide
tgtcaggtagaccaaa

SEQ ID NO: 1521 - DNA, 16 bp, Artificial sequence
  Synthetic oligonucleotide
gcagaaactactacga

SEQ ID NO: 1522 - DNA, 16 bp, Artificial sequence
  Synthetic oligonucleotide
tcaactagtccagctc

SEQ ID NO: 1523 - DNA, 16 bp, Artificial sequence
  Synthetic oligonucleotide
tcaatttgcttggaca

SEQ ID NO: 1524 - DNA, 16 bp, Artificial sequence
  Synthetic oligonucleotide
aaactaatcattccgc

SEQ ID NO: 1525 - DNA, 16 bp, Artificial sequence
  Synthetic oligonucleotide
gtcaatcaaagcccag

SEQ ID NO: 1526 - DNA, 16 bp, Artificial sequence
  Synthetic oligonucleotide
tgctacatcctttgcc

SEQ ID NO: 1527 - DNA, 16 bp, Artificial sequence
  Synthetic oligonucleotide
acccaatcatcgctta

SEQ ID NO: 1528 - DNA, 16 bp, Artificial sequence
  Synthetic oligonucleotide
gcaagagtggattagt

SEQ ID NO: 1529 - DNA, 16 bp, Artificial sequence
  Synthetic oligonucleotide
cgataagggaaccagg

SEQ ID NO: 1530 - DNA, 16 bp, Artificial sequence
  Synthetic oligonucleotide
ctccaagagccctagc

SEQ ID NO: 1531 - DNA, 16 bp, Artificial sequence
  Synthetic oligonucleotide
caaggaatagatggct

SEQ ID NO: 1532 - DNA, 16 bp, Artificial sequence
  Synthetic oligonucleotide
gcccactccttttaca

SEQ ID NO: 1533 - DNA, 16 bp, Artificial sequence
  Synthetic oligonucleotide
agctggaaggtgcatg

SEQ ID NO: 1534 - DNA, 16 bp, Artificial sequence
  Synthetic oligonucleotide
agggaattcccagtac

SEQ ID NO: 1535 - DNA, 16 bp, Artificial sequence
  Synthetic oligonucleotide
caagattgtctgcatg

SEQ ID NO: 1536 - DNA, 16 bp, Artificial sequence
  Synthetic oligonucleotide
tgctaactcttgtctt

SEQ ID NO: 1537 - DNA, 16 bp, Artificial sequence
  Synthetic oligonucleotide
ctacatctaacctcac

SEQ ID NO: 1538 - DNA, 16 bp, Artificial sequence
  Synthetic oligonucleotide
ccctaacagagttgcc

SEQ ID NO: 1539 - DNA, 16 bp, Artificial sequence
  Synthetic oligonucleotide
tggcagagcggccccc

SEQ ID NO: 1540 - DNA, 16 bp, Artificial sequence
  Synthetic oligonucleotide
agcattctggcggcaa

SEQ ID NO: 1541 - DNA, 16 bp, Artificial sequence
  Synthetic oligonucleotide
gatccattggctgacg

SEQ ID NO: 1542 - DNA, 16 bp, Artificial sequence
  Synthetic oligonucleotide
aacagtggtggacatt

SEQ ID NO: 1543 - DNA, 16 bp, Artificial sequence
  Synthetic oligonucleotide
agatggccgcagcact

SEQ ID NO: 1544 - DNA, 16 bp, Artificial sequence
  Synthetic oligonucleotide
agatgccactccgggt

SEQ ID NO: 1545 - DNA, 16 bp, Artificial sequence
  Synthetic oligonucleotide
taggcgaaaccgtagg

SEQ ID NO: 1546 - DNA, 16 bp, Artificial sequence
  Synthetic oligonucleotide
ccttccctatgtacgc

SEQ ID NO: 1547 - DNA, 16 bp, Artificial sequence
  Synthetic oligonucleotide
aacacgaggctgatgg

SEQ ID NO: 1548 - DNA, 16 bp, Artificial sequence
  Synthetic oligonucleotide
tatactgttaggatgt

SEQ ID NO: 1549 - DNA, 16 bp, Artificial sequence
  Synthetic oligonucleotide
taaatgaggtggactg

SEQ ID NO: 1550 - DNA, 16 bp, Artificial sequence
  Synthetic oligonucleotide
agcggctgtttctgtt

SEQ ID NO: 1551 - DNA, 16 bp, Artificial sequence
  Synthetic oligonucleotide
tttttgcaagggctcc

SEQ ID NO: 1552 - DNA, 16 bp, Artificial sequence
  Synthetic oligonucleotide
cctgtaagggcaagta

SEQ ID NO: 1553 - DNA, 16 bp, Artificial sequence
  Synthetic oligonucleotide
acttgttgtcactgat

SEQ ID NO: 1554 - DNA, 16 bp, Artificial sequence
  Synthetic oligonucleotide
aattattcaggtctcc

SEQ ID NO: 1555 - DNA, 16 bp, Artificial sequence
  Synthetic oligonucleotide
tgctccgaccgtaaga

SEQ ID NO: 1556 - DNA, 16 bp, Artificial sequence
  Synthetic oligonucleotide
ccaagctctaggaact

SEQ ID NO: 1557 - DNA, 16 bp, Artificial sequence
  Synthetic oligonucleotide
cagaagggcaccatat

SEQ ID NO: 1558 - DNA, 16 bp, Artificial sequence
  Synthetic oligonucleotide
tggctccgctgctggc

SEQ ID NO: 1559 - DNA, 16 bp, Artificial sequence
  Synthetic oligonucleotide
cgacggaggcgcgcgc

SEQ ID NO: 1560 - DNA, 16 bp, Artificial sequence
  Synthetic oligonucleotide
cgtgaggccgaacgca

SEQ ID NO: 1561 - DNA, 16 bp, Artificial sequence
  Synthetic oligonucleotide
tcccggtaaccacaca

SEQ ID NO: 1562 - DNA, 16 bp, Artificial sequence
  Synthetic oligonucleotide
atgctctatagctata

SEQ ID NO: 1563 - DNA, 16 bp, Artificial sequence
  Synthetic oligonucleotide
tcaataaccacccagg

SEQ ID NO: 1564 - DNA, 16 bp, Artificial sequence
  Synthetic oligonucleotide
gttcacgcacgcgcgc

SEQ ID NO: 1565 - DNA, 16 bp, Artificial sequence
  Synthetic oligonucleotide
gtcttagccggacaca

SEQ ID NO: 1566 - DNA, 16 bp, Artificial sequence
  Synthetic oligonucleotide
ggtcttatagaccata

SEQ ID NO: 1567 - DNA, 16 bp, Artificial sequence
  Synthetic oligonucleotide
gcggacgggagagaga

SEQ ID NO: 1568 - DNA, 16 bp, Artificial sequence
  Synthetic oligonucleotide
ggtgaattcccctatg

SEQ ID NO: 1569 - DNA, 16 bp, Artificial sequence
  Synthetic oligonucleotide
ccctagatcggctctg

SEQ ID NO: 1570 - DNA, 16 bp, Artificial sequence
  Synthetic oligonucleotide
cagcatctcgggatca

SEQ ID NO: 1571 - DNA, 16 bp, Artificial sequence
  Synthetic oligonucleotide
ggtagagtgaatcaca

SEQ ID NO: 1572 - DNA, 16 bp, Artificial sequence
  Synthetic oligonucleotide
ttccatatctcacaag

SEQ ID NO: 1573 - DNA, 16 bp, Artificial sequence
  Synthetic oligonucleotide
ggtattactgggtact

SEQ ID NO: 1574 - DNA, 16 bp, Artificial sequence
  Synthetic oligonucleotide
cgccgggttttaacac

SEQ ID NO: 1575 - DNA, 16 bp, Artificial sequence
  Synthetic oligonucleotide
agcggcagagataacc

SEQ ID NO: 1576 - DNA, 16 bp, Artificial sequence
  Synthetic oligonucleotide
gggcaagatctggtgt

SEQ ID NO: 1577 - DNA, 16 bp, Artificial sequence
  Synthetic oligonucleotide
agccaaccagtctacc

SEQ ID NO: 1578 - DNA, 16 bp, Artificial sequence
  Synthetic oligonucleotide
gaagagcccatgtgag

SEQ ID NO: 1579 - DNA, 16 bp, Artificial sequence
  Synthetic oligonucleotide
gtagattccgatgggc

SEQ ID NO: 1580 - DNA, 16 bp, Artificial sequence
  Synthetic oligonucleotide
gcacttgacggtcctt

SEQ ID NO: 1581 - DNA, 16 bp, Artificial sequence
  Synthetic oligonucleotide
actcacccatagggtc

SEQ ID NO: 1582 - DNA, 16 bp, Artificial sequence
  Synthetic oligonucleotide
gcagaaggtctcccgt

SEQ ID NO: 1583 - DNA, 16 bp, Artificial sequence
  Synthetic oligonucleotide
tgaacatgtggtaggc

SEQ ID NO: 1584 - DNA, 16 bp, Artificial sequence
  Synthetic oligonucleotide
gcaaaccctgtcatga

SEQ ID NO: 1585 - DNA, 16 bp, Artificial sequence
  Synthetic oligonucleotide
ctgcagtcattgtcca

SEQ ID NO: 1586 - DNA, 16 bp, Artificial sequence
  Synthetic oligonucleotide
tgcaatgtgcaggtcc

SEQ ID NO: 1587 - DNA, 16 bp, Artificial sequence
  Synthetic oligonucleotide
tatcaatctccctcct

SEQ ID NO: 1588 - DNA, 16 bp, Artificial sequence
  Synthetic oligonucleotide
ggccactagtgggcac

SEQ ID NO: 1589 - DNA, 16 bp, Artificial sequence
  Synthetic oligonucleotide
ttctcagtatgaatgt

SEQ ID NO: 1590 - DNA, 16 bp, Artificial sequence
  Synthetic oligonucleotide
actaaagctctggccg

SEQ ID NO: 1591 - DNA, 16 bp, Artificial sequence
  Synthetic oligonucleotide
caggttggattcgaca

SEQ ID NO: 1592 - DNA, 16 bp, Artificial sequence
  Synthetic oligonucleotide
tgacagggctttgatc

SEQ ID NO: 1593 - DNA, 16 bp, Artificial sequence
  Synthetic oligonucleotide
agccaaagttgtgtca

SEQ ID NO: 1594 - DNA, 16 bp, Artificial sequence
  Synthetic oligonucleotide
gttcaagtgcttatat

SEQ ID NO: 1595 - DNA, 16 bp, Artificial sequence
  Synthetic oligonucleotide
atagatgtcaggtaga

SEQ ID NO: 1596 - DNA, 16 bp, Artificial sequence
  Synthetic oligonucleotide
cccttaaccccgcgcc

SEQ ID NO: 1597 - DNA, 16 bp, Artificial sequence
  Synthetic oligonucleotide
cctgagagatcaacta

SEQ ID NO: 1598 - DNA, 16 bp, Artificial sequence
  Synthetic oligonucleotide
ctctctataggtatgg

SEQ ID NO: 1599 - DNA, 16 bp, Artificial sequence
  Synthetic oligonucleotide
ccacatccttctacta

SEQ ID NO: 1600 - DNA, 16 bp, Artificial sequence
  Synthetic oligonucleotide
tgacacaagagtgtca

SEQ ID NO: 1601 - DNA, 16 bp, Artificial sequence
  Synthetic oligonucleotide
agagatgctacatcct

SEQ ID NO: 1602 - DNA, 16 bp, Artificial sequence
  Synthetic oligonucleotide
gagcgaggcacatctc

SEQ ID NO: 1603 - DNA, 16 bp, Artificial sequence
  Synthetic oligonucleotide
cggaattctgcacttc

SEQ ID NO: 1604 - DNA, 16 bp, Artificial sequence
  Synthetic oligonucleotide
tgtcacacgataaggg

SEQ ID NO: 1605 - DNA, 16 bp, Artificial sequence
  Synthetic oligonucleotide
acctacagtcagctcc

SEQ ID NO: 1606 - DNA, 16 bp, Artificial sequence
  Synthetic oligonucleotide
cccaacagatcttgtc

SEQ ID NO: 1607 - DNA, 16 bp, Artificial sequence
  Synthetic oligonucleotide
tgtgattgaagcccac

SEQ ID NO: 1608 - DNA, 16 bp, Artificial sequence
  Synthetic oligonucleotide
acatgatcagacgcac

SEQ ID NO: 1609 - DNA, 16 bp, Artificial sequence
  Synthetic oligonucleotide
ggtcaaaggaagtagc

SEQ ID NO: 1610 - DNA, 16 bp, Artificial sequence
  Synthetic oligonucleotide
catgagactgatgttt

SEQ ID NO: 1611 - DNA, 16 bp, Artificial sequence
  Synthetic oligonucleotide
ccaaagtgctaactct

SEQ ID NO: 1612 - DNA, 16 bp, Artificial sequence
  Synthetic oligonucleotide
ggccacctacatctaa

SEQ ID NO: 1613 - DNA, 16 bp, Artificial sequence
  Synthetic oligonucleotide
ggcctatggtccccct

SEQ ID NO: 1614 - DNA, 16 bp, Artificial sequence
  Synthetic oligonucleotide
gggtgacggagagtcc

SEQ ID NO: 1615 - DNA, 16 bp, Artificial sequence
  Synthetic oligonucleotide
ggagcattctggcggc

SEQ ID NO: 1616 - DNA, 16 bp, Artificial sequence
  Synthetic oligonucleotide
acgatccattggctga

SEQ ID NO: 1617 - DNA, 16 bp, Artificial sequence
  Synthetic oligonucleotide
agatgatcgacaggat

SEQ ID NO: 1618 - DNA, 16 bp, Artificial sequence
  Synthetic oligonucleotide
tagatggccgcagcac

SEQ ID NO: 1619 - DNA, 16 bp, Artificial sequence
  Synthetic oligonucleotide
gagatgccactccggg

SEQ ID NO: 1620 - DNA, 16 bp, Artificial sequence
  Synthetic oligonucleotide
caccgctgagaagggc

SEQ ID NO: 1621 - DNA, 16 bp, Artificial sequence
  Synthetic oligonucleotide
cccttccctatgtacg

SEQ ID NO: 1622 - DNA, 16 bp, Artificial sequence
  Synthetic oligonucleotide
tcaacacgaggctgat

SEQ ID NO: 1623 - DNA, 16 bp, Artificial sequence
  Synthetic oligonucleotide
ggattatactgttagg

SEQ ID NO: 1624 - DNA, 16 bp, Artificial sequence
  Synthetic oligonucleotide
tctaaatgaggtggac

SEQ ID NO: 1625 - DNA, 16 bp, Artificial sequence
  Synthetic oligonucleotide
cagcggctgtttctgt

SEQ ID NO: 1626 - DNA, 16 bp, Artificial sequence
  Synthetic oligonucleotide
gtttttgcaagggctc

SEQ ID NO: 1627 - DNA, 16 bp, Artificial sequence
  Synthetic oligonucleotide
acctgtaagggcaagt

SEQ ID NO: 1628 - DNA, 16 bp, Artificial sequence
  Synthetic oligonucleotide
gacttgttgtcactga

SEQ ID NO: 1629 - DNA, 16 bp, Artificial sequence
  Synthetic oligonucleotide
agcagttataaaccat

SEQ ID NO: 1630 - DNA, 16 bp, Artificial sequence
  Synthetic oligonucleotide
gatgctccgaccgtaa

SEQ ID NO: 1631 - DNA, 16 bp, Artificial sequence
  Synthetic oligonucleotide
gcctagacccagccaa

SEQ ID NO: 1632 - DNA, 16 bp, Artificial sequence
  Synthetic oligonucleotide
atcagaagggcaccat

SEQ ID NO: 1633 - DNA, 16 bp, Artificial sequence
  Synthetic oligonucleotide
ttggctccgctgctgg

SEQ ID NO: 1634 - DNA, 16 bp, Artificial sequence
  Synthetic oligonucleotide
gcgacggaggcgcgcg

SEQ ID NO: 1635 - DNA, 16 bp, Artificial sequence
  Synthetic oligonucleotide
gcctgcgaggagagcg

SEQ ID NO: 1636 - DNA, 16 bp, Artificial sequence
  Synthetic oligonucleotide
atcccggtaaccacac

SEQ ID NO: 1637 - DNA, 16 bp, Artificial sequence
  Synthetic oligonucleotide
aatgctctatagctat

SEQ ID NO: 1638 - DNA, 16 bp, Artificial sequence
  Synthetic oligonucleotide
gctacagctcgcttct

SEQ ID NO: 1639 - DNA, 16 bp, Artificial sequence
  Synthetic oligonucleotide
gccttgaggcacggga

SEQ ID NO: 1640 - DNA, 16 bp, Artificial sequence
  Synthetic oligonucleotide
taatagagggcagcgg

SEQ ID NO: 1641 - DNA, 16 bp, Artificial sequence
  Synthetic oligonucleotide
ctgtaaggtcttatag

SEQ ID NO: 1642 - DNA, 16 bp, Artificial sequence
  Synthetic oligonucleotide
gtccagcggacgggag

SEQ ID NO: 1643 - DNA, 16 bp, Artificial sequence
  Synthetic oligonucleotide
tcagatggtgaattcc

SEQ ID NO: 1644 - DNA, 16 bp, Artificial sequence
  Synthetic oligonucleotide
tcaaatgaaggtcggg

SEQ ID NO: 1645 - DNA, 16 bp, Artificial sequence
  Synthetic oligonucleotide
accttagacacctgca

SEQ ID NO: 1646 - DNA, 16 bp, Artificial sequence
  Synthetic oligonucleotide
ctctaggtagagtgaa

SEQ ID NO: 1647 - DNA, 16 bp, Artificial sequence
  Synthetic oligonucleotide
cccttaatttgaccct

SEQ ID NO: 1648 - DNA, 16 bp, Artificial sequence
  Synthetic oligonucleotide
tgcttgggtattactg

SEQ ID NO: 1649 - DNA, 16 bp, Artificial sequence
  Synthetic oligonucleotide
gctgaaacttcgccgg

SEQ ID NO: 1650 - DNA, 16 bp, Artificial sequence
  Synthetic oligonucleotide
gggaagatagcggcag

SEQ ID NO: 1651 - DNA, 16 bp, Artificial sequence
  Synthetic oligonucleotide
tattaagatgtagcct

SEQ ID NO: 1652 - DNA, 16 bp, Artificial sequence
  Synthetic oligonucleotide
gaacactagccaacca

SEQ ID NO: 1653 - DNA, 16 bp, Artificial sequence
  Synthetic oligonucleotide
caacaggtcctaaagt

SEQ ID NO: 1654 - DNA, 16 bp, Artificial sequence
  Synthetic oligonucleotide
gatcattcaggtagat

SEQ ID NO: 1655 - DNA, 16 bp, Artificial sequence
  Synthetic oligonucleotide
ccccagcgatcttgca

SEQ ID NO: 1656 - DNA, 16 bp, Artificial sequence
  Synthetic oligonucleotide
cctgaatcctttgggt

SEQ ID NO: 1657 - DNA, 16 bp, Artificial sequence
  Synthetic oligonucleotide
gggagccacgaagatt

SEQ ID NO: 1658 - DNA, 16 bp, Artificial sequence
  Synthetic oligonucleotide
ggtaataagttcccca

SEQ ID NO: 1659 - DNA, 16 bp, Artificial sequence
  Synthetic oligonucleotide
ccctacatctaaccca

SEQ ID NO: 1660 - DNA, 16 bp, Artificial sequence
  Synthetic oligonucleotide
ggtcaccctgcagtca

SEQ ID NO: 1661 - DNA, 16 bp, Artificial sequence
  Synthetic oligonucleotide
tgccacaattacatcc

SEQ ID NO: 1662 - DNA, 16 bp, Artificial sequence
  Synthetic oligonucleotide
acgatgaaggatatca

SEQ ID NO: 1663 - DNA, 16 bp, Artificial sequence
  Synthetic oligonucleotide
agctagagcaaagcct

SEQ ID NO: 1664 - DNA, 16 bp, Artificial sequence
  Synthetic oligonucleotide
tcacacagatcgccat

SEQ ID NO: 1665 - DNA, 16 bp, Artificial sequence
  Synthetic oligonucleotide
atccaaccttggtgct

SEQ ID NO: 1666 - DNA, 16 bp, Artificial sequence
  Synthetic oligonucleotide
ccatagccatggacaa

SEQ ID NO: 1667 - DNA, 16 bp, Artificial sequence
  Synthetic oligonucleotide
cgcagtaagagacagc

SEQ ID NO: 1668 - DNA, 16 bp, Artificial sequence
  Synthetic oligonucleotide
cgtatagacatccaca

SEQ ID NO: 1669 - DNA, 16 bp, Artificial sequence
  Synthetic oligonucleotide
tgttcaagtgcttata

SEQ ID NO: 1670 - DNA, 16 bp, Artificial sequence
  Synthetic oligonucleotide
gaagactttagcttcc

SEQ ID NO: 1671 - DNA, 16 bp, Artificial sequence
  Synthetic oligonucleotide
catgaggagtatggct

SEQ ID NO: 1672 - DNA, 16 bp, Artificial sequence
  Synthetic oligonucleotide
cctaagatgtttccaa

SEQ ID NO: 1673 - DNA, 16 bp, Artificial sequence
  Synthetic oligonucleotide
gaaaggtatgctctct

SEQ ID NO: 1674 - DNA, 16 bp, Artificial sequence
  Synthetic oligonucleotide
tcccaagttctaagac

SEQ ID NO: 1675 - DNA, 16 bp, Artificial sequence
  Synthetic oligonucleotide
tgtcatagccccatgt

SEQ ID NO: 1676 - DNA, 16 bp, Artificial sequence
  Synthetic oligonucleotide
tgacaaccaactcaga

SEQ ID NO: 1677 - DNA, 16 bp, Artificial sequence
  Synthetic oligonucleotide
ggtttgagcgaggcac

SEQ ID NO: 1678 - DNA, 16 bp, Artificial sequence
  Synthetic oligonucleotide
cgcttttacattcgga

SEQ ID NO: 1679 - DNA, 16 bp, Artificial sequence
  Synthetic oligonucleotide
tagaactgtcacacga

SEQ ID NO: 1680 - DNA, 16 bp, Artificial sequence
  Synthetic oligonucleotide
ggcaaaccatggagac

SEQ ID NO: 1681 - DNA, 16 bp, Artificial sequence
  Synthetic oligonucleotide
gtctagtgcaacccaa

SEQ ID NO: 1682 - DNA, 16 bp, Artificial sequence
  Synthetic oligonucleotide
cctcagggcaacaagg

SEQ ID NO: 1683 - DNA, 16 bp, Artificial sequence
  Synthetic oligonucleotide
ggccttacatgacatg

SEQ ID NO: 1684 - DNA, 16 bp, Artificial sequence
  Synthetic oligonucleotide
gtgattagagcccaga

SEQ ID NO: 1685 - DNA, 16 bp, Artificial sequence
  Synthetic oligonucleotide
ccgtgataagcagtaa

SEQ ID NO: 1686 - DNA, 16 bp, Artificial sequence
  Synthetic oligonucleotide
ctcttccacggcttgc

SEQ ID NO: 1687 - DNA, 16 bp, Artificial sequence
  Synthetic oligonucleotide
cccaatgcacccgcgc

SEQ ID NO: 1688 - DNA, 16 bp, Artificial sequence
  Synthetic oligonucleotide
ggattaagctccatgc

SEQ ID NO: 1689 - DNA, 16 bp, Artificial sequence
  Synthetic oligonucleotide
ggagagggacaagctg

SEQ ID NO: 1690 - DNA, 16 bp, Artificial sequence
  Synthetic oligonucleotide
cggcaagttctgctca

SEQ ID NO: 1691 - DNA, 16 bp, Artificial sequence
  Synthetic oligonucleotide
gaggacgatgatactc

SEQ ID NO: 1692 - DNA, 16 bp, Artificial sequence
  Synthetic oligonucleotide
tgctacagttctgcca

SEQ ID NO: 1693 - DNA, 16 bp, Artificial sequence
  Synthetic oligonucleotide
cagtgatgtaaaacct

SEQ ID NO: 1694 - DNA, 16 bp, Artificial sequence
  Synthetic oligonucleotide
ccgggtgcctcaccgt

SEQ ID NO: 1695 - DNA, 16 bp, Artificial sequence
  Synthetic oligonucleotide
taggagtaatccgagt

SEQ ID NO: 1696 - DNA, 16 bp, Artificial sequence
  Synthetic oligonucleotide
cagacagaccgtctgg

SEQ ID NO: 1697 - DNA, 16 bp, Artificial sequence
  Synthetic oligonucleotide
ttttataaaccggaga

SEQ ID NO: 1698 - DNA, 16 bp, Artificial sequence
  Synthetic oligonucleotide
aagttccttagctact

SEQ ID NO: 1699 - DNA, 16 bp, Artificial sequence
  Synthetic oligonucleotide
ggcgagatggagttat

SEQ ID NO: 1700 - DNA, 16 bp, Artificial sequence
  Synthetic oligonucleotide
ctgggtcacccaccag

SEQ ID NO: 1701 - DNA, 16 bp, Artificial sequence
  Synthetic oligonucleotide
acacagaggttcgggc

SEQ ID NO: 1702 - DNA, 16 bp, Artificial sequence
  Synthetic oligonucleotide
gccaatgccacaagcc

SEQ ID NO: 1703 - DNA, 16 bp, Artificial sequence
  Synthetic oligonucleotide
tgtgtgacgaagatac

SEQ ID NO: 1704 - DNA, 16 bp, Artificial sequence
  Synthetic oligonucleotide
gtgagttgtttagatg

SEQ ID NO: 1705 - DNA, 16 bp, Artificial sequence
  Synthetic oligonucleotide
gagtgatgaaggcttt

SEQ ID NO: 1706 - DNA, 16 bp, Artificial sequence
  Synthetic oligonucleotide
cacggtcccaaggagt

SEQ ID NO: 1707 - DNA, 16 bp, Artificial sequence
  Synthetic oligonucleotide
caagtcattgccagac

SEQ ID NO: 1708 - DNA, 16 bp, Artificial sequence
  Synthetic oligonucleotide
gctgcgcgcgcgcgaa

SEQ ID NO: 1709 - DNA, 16 bp, Artificial sequence
  Synthetic oligonucleotide
gctgtcccgatcctca

SEQ ID NO: 1710 - DNA, 16 bp, Artificial sequence
  Synthetic oligonucleotide
gagggtcccgcgcact

SEQ ID NO: 1711 - DNA, 16 bp, Artificial sequence
  Synthetic oligonucleotide
gaacgcactgggccga

SEQ ID NO: 1712 - DNA, 16 bp, Artificial sequence
  Synthetic oligonucleotide
gagtcccctctattct

SEQ ID NO: 1713 - DNA, 16 bp, Artificial sequence
  Synthetic oligonucleotide
agccagagtatatatc

SEQ ID NO: 1714 - DNA, 16 bp, Artificial sequence
  Synthetic oligonucleotide
ggtgattgaaggagac

SEQ ID NO: 1715 - DNA, 16 bp, Artificial sequence
  Synthetic oligonucleotide
taccaccgaataagct

SEQ ID NO: 1716 - DNA, 16 bp, Artificial sequence
  Synthetic oligonucleotide
ggccttaaatgcgcct

SEQ ID NO: 1717 - DNA, 16 bp, Artificial sequence
  Synthetic oligonucleotide
gaccattttaggcaga

SEQ ID NO: 1718 - DNA, 16 bp, Artificial sequence
  Synthetic oligonucleotide
ggcggctccggagagg

SEQ ID NO: 1719 - DNA, 16 bp, Artificial sequence
  Synthetic oligonucleotide
ccgcgcactagcggaa

SEQ ID NO: 1720 - DNA, 16 bp, Artificial sequence
  Synthetic oligonucleotide
tctaatgggctggaca

SEQ ID NO: 1721 - DNA, 16 bp, Artificial sequence
  Synthetic oligonucleotide
ccacgatccattgcta

SEQ ID NO: 1722 - DNA, 16 bp, Artificial sequence
  Synthetic oligonucleotide
gtccatgtaactgacg

SEQ ID NO: 1723 - DNA, 16 bp, Artificial sequence
  Synthetic oligonucleotide
gccttttaaacccagg

SEQ ID NO: 1724 - DNA, 16 bp, Artificial sequence
  Synthetic oligonucleotide
ccggagtgctccggga

SEQ ID NO: 1725 - DNA, 16 bp, Artificial sequence
  Synthetic oligonucleotide
ttgaaacccacactaa

SEQ ID NO: 1726 - DNA, 16 bp, Artificial sequence
  Synthetic oligonucleotide
catgagtggcaacccc

SEQ ID NO: 1727 - DNA, 16 bp, Artificial sequence
  Synthetic oligonucleotide
ggcaaggcccatgcat

SEQ ID NO: 1728 - DNA, 16 bp, Artificial sequence
  Synthetic oligonucleotide
ggcttacagagaggta

SEQ ID NO: 1729 - DNA, 16 bp, Artificial sequence
  Synthetic oligonucleotide
ggcaacaggcattgga

SEQ ID NO: 1730 - DNA, 16 bp, Artificial sequence
  Synthetic oligonucleotide
tcccattaccctgtct

SEQ ID NO: 1731 - DNA, 16 bp, Artificial sequence
  Synthetic oligonucleotide
accgatgcatttctac

SEQ ID NO: 1732 - DNA, 16 bp, Artificial sequence
  Synthetic oligonucleotide
ctgcaggtactgccct

SEQ ID NO: 1733 - DNA, 16 bp, Artificial sequence
  Synthetic oligonucleotide
gggatacaattgaagt

SEQ ID NO: 1734 - DNA, 16 bp, Artificial sequence
  Synthetic oligonucleotide
cctataactggtcctt

SEQ ID NO: 1735 - DNA, 16 bp, Artificial sequence
  Synthetic oligonucleotide
ctgtattcagcaccac

SEQ ID NO: 1736 - DNA, 16 bp, Artificial sequence
  Synthetic oligonucleotide
aaccagggtacctgcc

SEQ ID NO: 1737 - DNA, 16 bp, Artificial sequence
  Synthetic oligonucleotide
agggaataattcgctt

SEQ ID NO: 1738 - DNA, 16 bp, Artificial sequence
  Synthetic oligonucleotide
tgtcagggtctagttc

SEQ ID NO: 1739 - DNA, 16 bp, Artificial sequence
  Synthetic oligonucleotide
cctaaacaatgtggcc

SEQ ID NO: 1740 - DNA, 16 bp, Artificial sequence
  Synthetic oligonucleotide
gctcgagttgcacaaa

SEQ ID NO: 1741 - DNA, 16 bp, Artificial sequence
  Synthetic oligonucleotide
tgtgacaccaacatcc

SEQ ID NO: 1742 - DNA, 16 bp, Artificial sequence
  Synthetic oligonucleotide
ttacaggctgttattg

SEQ ID NO: 1743 - DNA, 16 bp, Artificial sequence
  Synthetic oligonucleotide
ctcaaagggctagtgg

SEQ ID NO: 1744 - DNA, 16 bp, Artificial sequence
  Synthetic oligonucleotide
ggtgacaccaattttc

SEQ ID NO: 1745 - DNA, 16 bp, Artificial sequence
  Synthetic oligonucleotide
atatagagagccacat

SEQ ID NO: 1746 - DNA, 16 bp, Artificial sequence
  Synthetic oligonucleotide
ctctgatgatccagag

SEQ ID NO: 1747 - DNA, 16 bp, Artificial sequence
  Synthetic oligonucleotide
gttttcatgagcccaa

SEQ ID NO: 1748 - DNA, 16 bp, Artificial sequence
  Synthetic oligonucleotide
cgggatgaaggcttac

SEQ ID NO: 1749 - DNA, 16 bp, Artificial sequence
  Synthetic oligonucleotide
agacacttggttagga

SEQ ID NO: 1750 - DNA, 16 bp, Artificial sequence
  Synthetic oligonucleotide
tgctagttcttagcac

SEQ ID NO: 1751 - DNA, 16 bp, Artificial sequence
  Synthetic oligonucleotide
agctaatgtaagatgc

SEQ ID NO: 1752 - DNA, 16 bp, Artificial sequence
  Synthetic oligonucleotide
gggtaactcttcactt

SEQ ID NO: 1753 - DNA, 16 bp, Artificial sequence
  Synthetic oligonucleotide
gccgaaacagctcagc

SEQ ID NO: 1754 - DNA, 16 bp, Artificial sequence
  Synthetic oligonucleotide
gtgcaacatcctagag

SEQ ID NO: 1755 - DNA, 16 bp, Artificial sequence
  Synthetic oligonucleotide
acagagattctagtgg

SEQ ID NO: 1756 - DNA, 16 bp, Artificial sequence
  Synthetic oligonucleotide
tcccaaccctaaatgc

SEQ ID NO: 1757 - DNA, 16 bp, Artificial sequence
  Synthetic oligonucleotide
ggccagtgagacatcc

SEQ ID NO: 1758 - DNA, 16 bp, Artificial sequence
  Synthetic oligonucleotide
agcgatgtctcagaag

SEQ ID NO: 1759 - DNA, 16 bp, Artificial sequence
  Synthetic oligonucleotide
tcctaccttaaggact

SEQ ID NO: 1760 - DNA, 16 bp, Artificial sequence
  Synthetic oligonucleotide
gtggagatgtatcacc

SEQ ID NO: 1761 - DNA, 16 bp, Artificial sequence
  Synthetic oligonucleotide
ccagatctggcatgag

SEQ ID NO: 1762 - DNA, 16 bp, Artificial sequence
  Synthetic oligonucleotide
agccacacaatagtct

SEQ ID NO: 1763 - DNA, 16 bp, Artificial sequence
  Synthetic oligonucleotide
atcaaaggcaagctcc

SEQ ID NO: 1764 - DNA, 16 bp, Artificial sequence
  Synthetic oligonucleotide
tgtcaccaattcccag

SEQ ID NO: 1765 - DNA, 16 bp, Artificial sequence
  Synthetic oligonucleotide
gcggcaagttctgctc

SEQ ID NO: 1766 - DNA, 16 bp, Artificial sequence
  Synthetic oligonucleotide
ggaggacgatgatact

SEQ ID NO: 1767 - DNA, 16 bp, Artificial sequence
  Synthetic oligonucleotide
gtgctacagttctgcc

SEQ ID NO: 1768 - DNA, 16 bp, Artificial sequence
  Synthetic oligonucleotide
agcactcatcacgcac

SEQ ID NO: 1769 - DNA, 16 bp, Artificial sequence
  Synthetic oligonucleotide
tccgggtgcctcaccg

SEQ ID NO: 1770 - DNA, 16 bp, Artificial sequence
  Synthetic oligonucleotide
cgtaggagtaatccga

SEQ ID NO: 1771 - DNA, 16 bp, Artificial sequence
  Synthetic oligonucleotide
ctcagacagaccgtct

SEQ ID NO: 1772 - DNA, 16 bp, Artificial sequence
  Synthetic oligonucleotide
gttttataaaccggag

SEQ ID NO: 1773 - DNA, 16 bp, Artificial sequence
  Synthetic oligonucleotide
aaagttccttagctac

SEQ ID NO: 1774 - DNA, 16 bp, Artificial sequence
  Synthetic oligonucleotide
gggcgagatggagtta

SEQ ID NO: 1775 - DNA, 16 bp, Artificial sequence
  Synthetic oligonucleotide
ggatgcactgggtcac

SEQ ID NO: 1776 - DNA, 16 bp, Artificial sequence
  Synthetic oligonucleotide
ttcacacagaggttcg

SEQ ID NO: 1777 - DNA, 16 bp, Artificial sequence
  Synthetic oligonucleotide
agtatgccaatgccac

SEQ ID NO: 1778 - DNA, 16 bp, Artificial sequence
  Synthetic oligonucleotide
atgtgtgacgaagata

SEQ ID NO: 1779 - DNA, 16 bp, Artificial sequence
  Synthetic oligonucleotide
agtgagttgtttagat

SEQ ID NO: 1780 - DNA, 16 bp, Artificial sequence
  Synthetic oligonucleotide
ggagtgatgaaggctt

SEQ ID NO: 1781 - DNA, 16 bp, Artificial sequence
  Synthetic oligonucleotide
tcacggtcccaaggag

SEQ ID NO: 1782 - DNA, 16 bp, Artificial sequence
  Synthetic oligonucleotide
tacaagtcattgccag

SEQ ID NO: 1783 - DNA, 16 bp, Artificial sequence
  Synthetic oligonucleotide
ggctgcgcgcgcgcga

SEQ ID NO: 1784 - DNA, 16 bp, Artificial sequence
  Synthetic oligonucleotide
cagctgtcccgatcct

SEQ ID NO: 1785 - DNA, 16 bp, Artificial sequence
  Synthetic oligonucleotide
ggagggtcccgcgcac

SEQ ID NO: 1786 - DNA, 16 bp, Artificial sequence
  Synthetic oligonucleotide
cgaacgcactgggccg

SEQ ID NO: 1787 - DNA, 16 bp, Artificial sequence
  Synthetic oligonucleotide
ggagtcccctctattc

SEQ ID NO: 1788 - DNA, 16 bp, Artificial sequence
  Synthetic oligonucleotide
tgcattagggtttcta

SEQ ID NO: 1789 - DNA, 16 bp, Artificial sequence
  Synthetic oligonucleotide
ggctccaacaaaccta

SEQ ID NO: 1790 - DNA, 16 bp, Artificial sequence
  Synthetic oligonucleotide
ccagactaccaccgaa

SEQ ID NO: 1791 - DNA, 16 bp, Artificial sequence
  Synthetic oligonucleotide
cgctgcagtagggtgt

SEQ ID NO: 1792 - DNA, 16 bp, Artificial sequence
  Synthetic oligonucleotide
ggacatgcatggctgt

SEQ ID NO: 1793 - DNA, 16 bp, Artificial sequence
  Synthetic oligonucleotide
gcgcagactctggcgg

SEQ ID NO: 1794 - DNA, 16 bp, Artificial sequence
  Synthetic oligonucleotide
ggcactcacgctgacg

SEQ ID NO: 1795 - DNA, 16 bp, Artificial sequence
  Synthetic oligonucleotide
gctcatcttcatcgcc

SEQ ID NO: 1796 - DNA, 16 bp, Artificial sequence
  Synthetic oligonucleotide
ccgtttggtgatgatg

SEQ ID NO: 1797 - DNA, 16 bp, Artificial sequence
  Synthetic oligonucleotide
aggcagccagtcttgt

SEQ ID NO: 1798 - DNA, 16 bp, Artificial sequence
  Synthetic oligonucleotide
tgtatttccgtggcct

SEQ ID NO: 1799 - DNA, 16 bp, Artificial sequence
  Synthetic oligonucleotide
acggagactcccatcc

SEQ ID NO: 1800 - DNA, 16 bp, Artificial sequence
  Synthetic oligonucleotide
agcaacgaggcagatt

SEQ ID NO: 1801 - DNA, 16 bp, Artificial sequence
  Synthetic oligonucleotide
aacaacatgagtggca

SEQ ID NO: 1802 - DNA, 16 bp, Artificial sequence
  Synthetic oligonucleotide
ggctcgggaccatcaa

SEQ ID NO: 1803 - DNA, 16 bp, Artificial sequence
  Synthetic oligonucleotide
caccaggcttacagag

SEQ ID NO: 1804 - DNA, 16 bp, Artificial sequence
  Synthetic oligonucleotide
cacaggtgggcaacag

SEQ ID NO: 1805 - DNA, 16 bp, Artificial sequence
  Synthetic oligonucleotide
ctttatcccattaccc

SEQ ID NO: 1806 - DNA, 16 bp, Artificial sequence
  Synthetic oligonucleotide
aagaatcccgtcaccc

SEQ ID NO: 1807 - DNA, 16 bp, Artificial sequence
  Synthetic oligonucleotide
gtagtaagtggtcatc

SEQ ID NO: 1808 - DNA, 16 bp, Artificial sequence
  Synthetic oligonucleotide
aatgcaagggatgttt

SEQ ID NO: 1809 - DNA, 16 bp, Artificial sequence
  Synthetic oligonucleotide
agcgatcctgctccca

SEQ ID NO: 1810 - DNA, 16 bp, Artificial sequence
  Synthetic oligonucleotide
tctgaaccctgttccc

SEQ ID NO: 1811 - DNA, 16 bp, Artificial sequence
  Synthetic oligonucleotide
aggtcctacctcaatg

SEQ ID NO: 1812 - DNA, 16 bp, Artificial sequence
  Synthetic oligonucleotide
ctgcatcagtggagaa

SEQ ID NO: 1813 - DNA, 16 bp, Artificial sequence
  Synthetic oligonucleotide
cagagctagtttgtca

SEQ ID NO: 1814 - DNA, 16 bp, Artificial sequence
  Synthetic oligonucleotide
ctccatcctaaacaat

SEQ ID NO: 1815 - DNA, 16 bp, Artificial sequence
  Synthetic oligonucleotide
gggaagctcgagttgc

SEQ ID NO: 1816 - DNA, 16 bp, Artificial sequence
  Synthetic oligonucleotide
aacctagtgtgacacc

SEQ ID NO: 1817 - DNA, 16 bp, Artificial sequence
  Synthetic oligonucleotide
tgcaaataaccccacc

SEQ ID NO: 1818 - DNA, 16 bp, Artificial sequence
  Synthetic oligonucleotide
tactaagagtcaggat

SEQ ID NO: 1819 - DNA, 16 bp, Artificial sequence
  Synthetic oligonucleotide
cactagcaaccaagga

SEQ ID NO: 1820 - DNA, 16 bp, Artificial sequence
  Synthetic oligonucleotide
ccagataattcctcgg

SEQ ID NO: 1821 - DNA, 16 bp, Artificial sequence
  Synthetic oligonucleotide
acctactgctttgagc

SEQ ID NO: 1822 - DNA, 16 bp, Artificial sequence
  Synthetic oligonucleotide
tgttttcatgagccca

SEQ ID NO: 1823 - DNA, 16 bp, Artificial sequence
  Synthetic oligonucleotide
ccagacgggatgaagg

SEQ ID NO: 1824 - DNA, 16 bp, Artificial sequence
  Synthetic oligonucleotide
cacaacttaccagcaa

SEQ ID NO: 1825 - DNA, 16 bp, Artificial sequence
  Synthetic oligonucleotide
ctgataactactttgc

SEQ ID NO: 1826 - DNA, 16 bp, Artificial sequence
  Synthetic oligonucleotide
acagacatgtaagagc

SEQ ID NO: 1827 - DNA, 16 bp, Artificial sequence
  Synthetic oligonucleotide
attgagtaagggtaac

SEQ ID NO: 1828 - DNA, 16 bp, Artificial sequence
  Synthetic oligonucleotide
ttaaagccgaaacagc

SEQ ID NO: 1829 - DNA, 16 bp, Artificial sequence
  Synthetic oligonucleotide
ttccagtgcaacatcc

SEQ ID NO: 1830 - DNA, 16 bp, Artificial sequence
  Synthetic oligonucleotide
ccggagactacacaga

SEQ ID NO: 1831 - DNA, 16 bp, Artificial sequence
  Synthetic oligonucleotide
ggacagtttaatggct

SEQ ID NO: 1832 - DNA, 16 bp, Artificial sequence
  Synthetic oligonucleotide
ctgatttgggcatggc

SEQ ID NO: 1833 - DNA, 16 bp, Artificial sequence
  Synthetic oligonucleotide
gggaacacagcgatgt

SEQ ID NO: 1834 - DNA, 16 bp, Artificial sequence
  Synthetic oligonucleotide
agtgagacatggctcc

SEQ ID NO: 1835 - DNA, 16 bp, Artificial sequence
  Synthetic oligonucleotide
agtaagtggactgtga

SEQ ID NO: 1836 - DNA, 16 bp, Artificial sequence
  Synthetic oligonucleotide
tctaaccagatctggc

SEQ ID NO: 1837 - DNA, 16 bp, Artificial sequence
  Synthetic oligonucleotide
tgtcaagagagccaca

SEQ ID NO: 1838 - DNA, 16 bp, Artificial sequence
  Synthetic oligonucleotide
tgggaagccacgctgc

SEQ ID NO: 1839 - DNA, 16 bp, Artificial sequence
  Synthetic oligonucleotide
ccttaatacctgaggg

SEQ ID NO: 1840 - DNA, 16 bp, Artificial sequence
  Synthetic oligonucleotide
cagcggagtttctgca

SEQ ID NO: 1841 - DNA, 16 bp, Artificial sequence
  Synthetic oligonucleotide
gagcatatctaactca

SEQ ID NO: 1842 - DNA, 16 bp, Artificial sequence
  Synthetic oligonucleotide
tgcatttacagtgccc

SEQ ID NO: 1843 - DNA, 16 bp, Artificial sequence
  Synthetic oligonucleotide
attaagccgatggcag

SEQ ID NO: 1844 - DNA, 16 bp, Artificial sequence
  Synthetic oligonucleotide
tgtcaaatgaaggtcg

SEQ ID NO: 1845 - DNA, 16 bp, Artificial sequence
  Synthetic oligonucleotide
aacgacattctggctt

SEQ ID NO: 1846 - DNA, 16 bp, Artificial sequence
  Synthetic oligonucleotide
aaatacgatcttctgg

SEQ ID NO: 1847 - DNA, 16 bp, Artificial sequence
  Synthetic oligonucleotide
tcttaacatcaatcgc

SEQ ID NO: 1848 - DNA, 16 bp, Artificial sequence
  Synthetic oligonucleotide
gcgagtacggagactc

SEQ ID NO: 1849 - DNA, 16 bp, Artificial sequence
  Synthetic oligonucleotide
accaactgacagctat

SEQ ID NO: 1850 - DNA, 16 bp, Artificial sequence
  Synthetic oligonucleotide
acaagttaaatggttc

SEQ ID NO: 1851 - DNA, 16 bp, Artificial sequence
  Synthetic oligonucleotide
catttagaaaaacgag

SEQ ID NO: 1852 - DNA, 16 bp, Artificial sequence
  Synthetic oligonucleotide
ccgatgggccttgtta

SEQ ID NO: 1853 - DNA, 16 bp, Artificial sequence
  Synthetic oligonucleotide
caatagtctctggtac

SEQ ID NO: 1854 - DNA, 16 bp, Artificial sequence
  Synthetic oligonucleotide
aatagcagggcaaatg

SEQ ID NO: 1855 - DNA, 16 bp, Artificial sequence
  Synthetic oligonucleotide
cagcgatgataggaga

SEQ ID NO: 1856 - DNA, 16 bp, Artificial sequence
  Synthetic oligonucleotide
tcagagaaaccctaag

SEQ ID NO: 1857 - DNA, 16 bp, Artificial sequence
  Synthetic oligonucleotide
gagcatgttccactac

SEQ ID NO: 1858 - DNA, 16 bp, Artificial sequence
  Synthetic oligonucleotide
caatatctcctggcat

SEQ ID NO: 1859 - DNA, 16 bp, Artificial sequence
  Synthetic oligonucleotide
aatgacgggaaaggca

SEQ ID NO: 1860 - DNA, 16 bp, Artificial sequence
  Synthetic oligonucleotide
ttcaaacggatttatc

SEQ ID NO: 1861 - DNA, 16 bp, Artificial sequence
  Synthetic oligonucleotide
gcattgtacgatgaag

SEQ ID NO: 1862 - DNA, 16 bp, Artificial sequence
  Synthetic oligonucleotide
cacaaaggcgatgaag

SEQ ID NO: 1863 - DNA, 16 bp, Artificial sequence
  Synthetic oligonucleotide
gaacttatgttgagta

SEQ ID NO: 1864 - DNA, 16 bp, Artificial sequence
  Synthetic oligonucleotide
aataatgattcgagtt

SEQ ID NO: 1865 - DNA, 16 bp, Artificial sequence
  Synthetic oligonucleotide
ctctattgacttacta

SEQ ID NO: 1866 - DNA, 16 bp, Artificial sequence
  Synthetic oligonucleotide
ttcaagtgcttatcta

SEQ ID NO: 1867 - DNA, 16 bp, Artificial sequence
  Synthetic oligonucleotide
ctacgagacctcacat

SEQ ID NO: 1868 - DNA, 16 bp, Artificial sequence
  Synthetic oligonucleotide
tataggtatggaaatc

SEQ ID NO: 1869 - DNA, 16 bp, Artificial sequence
  Synthetic oligonucleotide
tcagtattcacctctg

SEQ ID NO: 1870 - DNA, 16 bp, Artificial sequence
  Synthetic oligonucleotide
tttgagcgaggcacat

SEQ ID NO: 1871 - DNA, 16 bp, Artificial sequence
  Synthetic oligonucleotide
aagaacttaaagccga

SEQ ID NO: 1872 - DNA, 16 bp, Artificial sequence
  Synthetic oligonucleotide
aagtcatgcgctttta

SEQ ID NO: 1873 - DNA, 16 bp, Artificial sequence
  Synthetic oligonucleotide
gccgaggaaacacaat

SEQ ID NO: 1874 - DNA, 16 bp, Artificial sequence
  Synthetic oligonucleotide
cgtgataagcagtaaa

SEQ ID NO: 1875 - DNA, 16 bp, Artificial sequence
  Synthetic oligonucleotide
agtatatatccacctt

SEQ ID NO: 1876 - DNA, 16 bp, Artificial sequence
  Synthetic oligonucleotide
actaatagagggcagc

SEQ ID NO: 1877 - DNA, 16 bp, Artificial sequence
  Synthetic oligonucleotide
gtcttatagaccataa

SEQ ID NO: 1878 - DNA, 16 bp, Artificial sequence
  Synthetic oligonucleotide
accgaagggagtagat

SEQ ID NO: 1879 - DNA, 16 bp, Artificial sequence
  Synthetic oligonucleotide
caacggaacatctttt

SEQ ID NO: 1880 - DNA, 16 bp, Artificial sequence
  Synthetic oligonucleotide
agctttactaacaatg

SEQ ID NO: 1881 - DNA, 16 bp, Artificial sequence
  Synthetic oligonucleotide
acacagaaacgattat

SEQ ID NO: 1882 - DNA, 16 bp, Artificial sequence
  Synthetic oligonucleotide
ggcttagctatcatac

SEQ ID NO: 1883 - DNA, 16 bp, Artificial sequence
  Synthetic oligonucleotide
agcaactggattatgc

SEQ ID NO: 1884 - DNA, 16 bp, Artificial sequence
  Synthetic oligonucleotide
aagcaacgaggcagat

SEQ ID NO: 1885 - DNA, 16 bp, Artificial sequence
  Synthetic oligonucleotide
tgttaaactcaatcaa

SEQ ID NO: 1886 - DNA, 16 bp, Artificial sequence
  Synthetic oligonucleotide
tatcataacgaatatc

SEQ ID NO: 1887 - DNA, 16 bp, Artificial sequence
  Synthetic oligonucleotide
gacaaacgaggaagca

SEQ ID NO: 1888 - DNA, 16 bp, Artificial sequence
  Synthetic oligonucleotide
taccgatgcatttcta

SEQ ID NO: 1889 - DNA, 16 bp, Artificial sequence
  Synthetic oligonucleotide
ccttagacaatggagg

SEQ ID NO: 1890 - DNA, 16 bp, Artificial sequence
  Synthetic oligonucleotide
tgcaagggatgttttc

SEQ ID NO: 1891 - DNA, 16 bp, Artificial sequence
  Synthetic oligonucleotide
tcggtatagaggaatg

SEQ ID NO: 1892 - DNA, 16 bp, Artificial sequence
  Synthetic oligonucleotide
cgcattatggaaatga

SEQ ID NO: 1893 - DNA, 16 bp, Artificial sequence
  Synthetic oligonucleotide
ggataatagtaagctg

SEQ ID NO: 1894 - DNA, 16 bp, Artificial sequence
  Synthetic oligonucleotide
acctagtgagttaagg

SEQ ID NO: 1895 - DNA, 16 bp, Artificial sequence
  Synthetic oligonucleotide
ggctaaactatagatt

SEQ ID NO: 1896 - DNA, 16 bp, Artificial sequence
  Synthetic oligonucleotide
caaataaccccaccta

SEQ ID NO: 1897 - DNA, 16 bp, Artificial sequence
  Synthetic oligonucleotide
tgcaagattcaagagc

SEQ ID NO: 1898 - DNA, 16 bp, Artificial sequence
  Synthetic oligonucleotide
ttgcaacgaagaagag

SEQ ID NO: 1899 - DNA, 16 bp, Artificial sequence
  Synthetic oligonucleotide
agtcaagataccacct

SEQ ID NO: 1900 - DNA, 16 bp, Artificial sequence
  Synthetic oligonucleotide
acacacatgggacagc

SEQ ID NO: 1901 - DNA, 16 bp, Artificial sequence
  Synthetic oligonucleotide
atgcattaagatagta

SEQ ID NO: 1902 - DNA, 16 bp, Artificial sequence
  Synthetic oligonucleotide
aagaaaatgacggcta

SEQ ID NO: 1903 - DNA, 16 bp, Artificial sequence
  Synthetic oligonucleotide
ccatatgtaatggctt

SEQ ID NO: 1904 - DNA, 16 bp, Artificial sequence
  Synthetic oligonucleotide
tgttaaagagggcctg

SEQ ID NO: 1905 - DNA, 16 bp, Artificial sequence
  Synthetic oligonucleotide
tgcaagatgtaagatg

SEQ ID NO: 1906 - DNA, 16 bp, Artificial sequence
  Synthetic oligonucleotide
gagtaagggtaactct

SEQ ID NO: 1907 - DNA, 16 bp, Artificial sequence
  Synthetic oligonucleotide
gtaaaataacgagcct

SEQ ID NO: 1908 - DNA, 16 bp, Artificial sequence
  Synthetic oligonucleotide
acttaagggttcttat

SEQ ID NO: 1909 - DNA, 16 bp, Artificial sequence
  Synthetic oligonucleotide
agcaagagtggattag

SEQ ID NO: 1910 - DNA, 16 bp, Artificial sequence
  Synthetic oligonucleotide
gtggaaagatcctgca

SEQ ID NO: 1911 - DNA, 16 bp, Artificial sequence
  Synthetic oligonucleotide
gattagggacagttta

SEQ ID NO: 1912 - DNA, 16 bp, Artificial sequence
  Synthetic oligonucleotide
agctaacagtattgaa

SEQ ID NO: 1913 - DNA, 16 bp, Artificial sequence
  Synthetic oligonucleotide
gaatttcgagagaggg

SEQ ID NO: 1914 - DNA, 16 bp, Artificial sequence
  Synthetic oligonucleotide
ccaaatacccctagta

SEQ ID NO: 1915 - DNA, 16 bp, Artificial sequence
  Synthetic oligonucleotide
ctaactacacagctta

SEQ ID NO: 1916 - DNA, 16 bp, Artificial sequence
  Synthetic oligonucleotide
tgttaagcctgtcctc

SEQ ID NO: 1917 - DNA, 16 bp, Artificial sequence
  Synthetic oligonucleotide
gattaagctccatgca

SEQ ID NO: 1918 - DNA, 16 bp, Artificial sequence
  Synthetic oligonucleotide
aacatactcaggactg

SEQ ID NO: 1919 - DNA, 16 bp, Artificial sequence
  Synthetic oligonucleotide
tgtacttgtaaacact

SEQ ID NO: 1920 - DNA, 16 bp, Artificial sequence
  Synthetic oligonucleotide
ttgaattaagccgatg

SEQ ID NO: 1921 - DNA, 16 bp, Artificial sequence
  Synthetic oligonucleotide
gttaaacaatcttgtc

SEQ ID NO: 1922 - DNA, 16 bp, Artificial sequence
  Synthetic oligonucleotide
caacgacattctggct

SEQ ID NO: 1923 - DNA, 16 bp, Artificial sequence
  Synthetic oligonucleotide
gaaatacgatcttctg

SEQ ID NO: 1924 - DNA, 16 bp, Artificial sequence
  Synthetic oligonucleotide
ctcttaacatcaatcg

SEQ ID NO: 1925 - DNA, 16 bp, Artificial sequence
  Synthetic oligonucleotide
agcgagtacggagact

SEQ ID NO: 1926 - DNA, 16 bp, Artificial sequence
  Synthetic oligonucleotide
ttctagcaccaactga

SEQ ID NO: 1927 - DNA, 16 bp, Artificial sequence
  Synthetic oligonucleotide
gacaagttaaatggtt

SEQ ID NO: 1928 - DNA, 16 bp, Artificial sequence
  Synthetic oligonucleotide
aatcatggatgagatg

SEQ ID NO: 1929 - DNA, 16 bp, Artificial sequence
  Synthetic oligonucleotide
aggtagattccgatgg

SEQ ID NO: 1930 - DNA, 16 bp, Artificial sequence
  Synthetic oligonucleotide
gcaatagtctctggta

SEQ ID NO: 1931 - DNA, 16 bp, Artificial sequence
  Synthetic oligonucleotide
caatagcagggcaaat

SEQ ID NO: 1932 - DNA, 16 bp, Artificial sequence
  Synthetic oligonucleotide
tttgaagacagcgatg

SEQ ID NO: 1933 - DNA, 16 bp, Artificial sequence
  Synthetic oligonucleotide
tactaattcctgggta

SEQ ID NO: 1934 - DNA, 16 bp, Artificial sequence
  Synthetic oligonucleotide
gactatgaccacaaac

SEQ ID NO: 1935 - DNA, 16 bp, Artificial sequence
  Synthetic oligonucleotide
acaatatctcctggca

SEQ ID NO: 1936 - DNA, 16 bp, Artificial sequence
  Synthetic oligonucleotide
aaatgacgggaaaggc

SEQ ID NO: 1937 - DNA, 16 bp, Artificial sequence
  Synthetic oligonucleotide
tttcaaacggatttat

SEQ ID NO: 1938 - DNA, 16 bp, Artificial sequence
  Synthetic oligonucleotide
tgcattgtacgatgaa

SEQ ID NO: 1939 - DNA, 16 bp, Artificial sequence
  Synthetic oligonucleotide
tcacaaaggcgatgaa

SEQ ID NO: 1940 - DNA, 16 bp, Artificial sequence
  Synthetic oligonucleotide
tcaaacctagtgtgac

SEQ ID NO: 1941 - DNA, 16 bp, Artificial sequence
  Synthetic oligonucleotide
aaataatgattcgagt

SEQ ID NO: 1942 - DNA, 16 bp, Artificial sequence
  Synthetic oligonucleotide
cagcactctattgact

SEQ ID NO: 1943 - DNA, 16 bp, Artificial sequence
  Synthetic oligonucleotide
acactatatgtgttca

SEQ ID NO: 1944 - DNA, 16 bp, Artificial sequence
  Synthetic oligonucleotide
tactacgagacctcac

SEQ ID NO: 1945 - DNA, 16 bp, Artificial sequence
  Synthetic oligonucleotide
ctataggtatggaaat

SEQ ID NO: 1946 - DNA, 16 bp, Artificial sequence
  Synthetic oligonucleotide
agtagaatctaggaac

SEQ ID NO: 1947 - DNA, 16 bp, Artificial sequence
  Synthetic oligonucleotide
actcaaccgtccctgt

SEQ ID NO: 1948 - DNA, 16 bp, Artificial sequence
  Synthetic oligonucleotide
atgtaatgatgttgct

SEQ ID NO: 1949 - DNA, 16 bp, Artificial sequence
  Synthetic oligonucleotide
acaaagtcatgcgctt

SEQ ID NO: 1950 - DNA, 16 bp, Artificial sequence
  Synthetic oligonucleotide
ctgaacaggatggcac

SEQ ID NO: 1951 - DNA, 16 bp, Artificial sequence
  Synthetic oligonucleotide
gcttaaccgtgataag

SEQ ID NO: 1952 - DNA, 16 bp, Artificial sequence
  Synthetic oligonucleotide
gtttaatcaataacca

SEQ ID NO: 1953 - DNA, 16 bp, Artificial sequence
  Synthetic oligonucleotide
tcccactaatagaggg

SEQ ID NO: 1954 - DNA, 16 bp, Artificial sequence
  Synthetic oligonucleotide
agcaaggcgagaactg

SEQ ID NO: 1955 - DNA, 16 bp, Artificial sequence
  Synthetic oligonucleotide
gaccgaagggagtaga

SEQ ID NO: 1956 - DNA, 16 bp, Artificial sequence
  Synthetic oligonucleotide
tgcaacggaacatctt

SEQ ID NO: 1957 - DNA, 16 bp, Artificial sequence
  Synthetic oligonucleotide
atctaatgggctggac

SEQ ID NO: 1958 - DNA, 16 bp, Artificial sequence
  Synthetic oligonucleotide
cgaaaagcacccgcat

SEQ ID NO: 1959 - DNA, 16 bp, Artificial sequence
  Synthetic oligonucleotide
gcttagggttttgcaa

SEQ ID NO: 1960 - DNA, 16 bp, Artificial sequence
  Synthetic oligonucleotide
ttataatgcttcagct

SEQ ID NO: 1961 - DNA, 16 bp, Artificial sequence
  Synthetic oligonucleotide
acggaaagcaacgagg

SEQ ID NO: 1962 - DNA, 16 bp, Artificial sequence
  Synthetic oligonucleotide
acaaatcgatgtcaat

SEQ ID NO: 1963 - DNA, 16 bp, Artificial sequence
  Synthetic oligonucleotide
acaatatcataacgaa

SEQ ID NO: 1964 - DNA, 16 bp, Artificial sequence
  Synthetic oligonucleotide
tgacaaacgaggaagc

SEQ ID NO: 1965 - DNA, 16 bp, Artificial sequence
  Synthetic oligonucleotide
atataccgatgcattt

SEQ ID NO: 1966 - DNA, 16 bp, Artificial sequence
  Synthetic oligonucleotide
acacaacctattgata

SEQ ID NO: 1967 - DNA, 16 bp, Artificial sequence
  Synthetic oligonucleotide
taataagttccccatc

SEQ ID NO: 1968 - DNA, 16 bp, Artificial sequence
  Synthetic oligonucleotide
agccgaggtaatttct

SEQ ID NO: 1969 - DNA, 16 bp, Artificial sequence
  Synthetic oligonucleotide
acgcattatggaaatg

SEQ ID NO: 1970 - DNA, 16 bp, Artificial sequence
  Synthetic oligonucleotide
tggataatagtaagct

SEQ ID NO: 1971 - DNA, 16 bp, Artificial sequence
  Synthetic oligonucleotide
ctacaacctagtgagt

SEQ ID NO: 1972 - DNA, 16 bp, Artificial sequence
  Synthetic oligonucleotide
tacaaacctgttctat

SEQ ID NO: 1973 - DNA, 16 bp, Artificial sequence
  Synthetic oligonucleotide
gtgcaaataaccccac

SEQ ID NO: 1974 - DNA, 16 bp, Artificial sequence
  Synthetic oligonucleotide
gtgcaagattcaagag

SEQ ID NO: 1975 - DNA, 16 bp, Artificial sequence
  Synthetic oligonucleotide
aaagagtaaggtgcac

SEQ ID NO: 1976 - DNA, 16 bp, Artificial sequence
  Synthetic oligonucleotide
tactaagttcctggat

SEQ ID NO: 1977 - DNA, 16 bp, Artificial sequence
  Synthetic oligonucleotide
atataataacatggcc

SEQ ID NO: 1978 - DNA, 16 bp, Artificial sequence
  Synthetic oligonucleotide
ctcgaatcaaatcaga

SEQ ID NO: 1979 - DNA, 16 bp, Artificial sequence
  Synthetic oligonucleotide
taagaaaatgacggct

SEQ ID NO: 1980 - DNA, 16 bp, Artificial sequence
  Synthetic oligonucleotide
tgccatatgtaatggc

SEQ ID NO: 1981 - DNA, 16 bp, Artificial sequence
  Synthetic oligonucleotide
cactaggagttaaagt

SEQ ID NO: 1982 - DNA, 16 bp, Artificial sequence
  Synthetic oligonucleotide
tgctaggcagaatgca

SEQ ID NO: 1983 - DNA, 16 bp, Artificial sequence
  Synthetic oligonucleotide
ctaaaacgagtgagaa

SEQ ID NO: 1984 - DNA, 16 bp, Artificial sequence
  Synthetic oligonucleotide
agtaaaataacgagcc

SEQ ID NO: 1985 - DNA, 16 bp, Artificial sequence
  Synthetic oligonucleotide
gacttaagggttctta

SEQ ID NO: 1986 - DNA, 16 bp, Artificial sequence
  Synthetic oligonucleotide
aacaacggaggacagg

SEQ ID NO: 1987 - DNA, 16 bp, Artificial sequence
  Synthetic oligonucleotide
tccaaatagagttcct

SEQ ID NO: 1988 - DNA, 16 bp, Artificial sequence
  Synthetic oligonucleotide
ttacagtgggattagg

SEQ ID NO: 1989 - DNA, 16 bp, Artificial sequence
  Synthetic oligonucleotide
ggttagtgagtcaaga

SEQ ID NO: 1990 - DNA, 16 bp, Artificial sequence
  Synthetic oligonucleotide
tggaatttcgagagag

SEQ ID NO: 1991 - DNA, 16 bp, Artificial sequence
  Synthetic oligonucleotide
caagacagttaatgtc

SEQ ID NO: 1992 - DNA, 16 bp, Artificial sequence
  Synthetic oligonucleotide
gactaactacacagct

SEQ ID NO: 1993 - DNA, 16 bp, Artificial sequence
  Synthetic oligonucleotide
gaatacgccacatgaa

SEQ ID NO: 1994 - DNA, 16 bp, Artificial sequence
  Synthetic oligonucleotide
aaggattaagctccat

SEQ ID NO: 1995 - DNA, 16 bp, Artificial sequence
  Synthetic oligonucleotide
agttagatttgctcta

SEQ ID NO: 1996 - DNA, 16 bp, Artificial sequence
  Synthetic oligonucleotide
gtgtacttgtaaacac

SEQ ID NO: 1997 - DNA, 16 bp, Artificial sequence
  Synthetic oligonucleotide
ttagaggacatgcatg

SEQ ID NO: 1998 - DNA, 16 bp, Artificial sequence
  Synthetic oligonucleotide
cgacatgggacctgtg

SEQ ID NO: 1999 - DNA, 16 bp, Artificial sequence
  Synthetic oligonucleotide
agcaacgacattctgg

SEQ ID NO: 2000 - DNA, 16 bp, Artificial sequence
  Synthetic oligonucleotide
agaaatacgatcttct

SEQ ID NO: 2001 - DNA, 16 bp, Artificial sequence
  Synthetic oligonucleotide
acaaaagatcatgtgg

SEQ ID NO: 2002 - DNA, 16 bp, Artificial sequence
  Synthetic oligonucleotide
tcagtagcgagtacgg

SEQ ID NO: 2003 - DNA, 16 bp, Artificial sequence
  Synthetic oligonucleotide
caatgagcatagttca

SEQ ID NO: 2004 - DNA, 16 bp, Artificial sequence
  Synthetic oligonucleotide
tcaaagtcagttagtt

SEQ ID NO: 2005 - DNA, 16 bp, Artificial sequence
  Synthetic oligonucleotide
ttgaatcatggatgag

SEQ ID NO: 2006 - DNA, 16 bp, Artificial sequence
  Synthetic oligonucleotide
caggtagattccgatg

SEQ ID NO: 2007 - DNA, 16 bp, Artificial sequence
  Synthetic oligonucleotide
gttcatatggctggct

SEQ ID NO: 2008 - DNA, 16 bp, Artificial sequence
  Synthetic oligonucleotide
tcaatagcagggcaaa

SEQ ID NO: 2009 - DNA, 16 bp, Artificial sequence
  Synthetic oligonucleotide
agattatgggttggct

SEQ ID NO: 2010 - DNA, 16 bp, Artificial sequence
  Synthetic oligonucleotide
tcatactaattcctgg

SEQ ID NO: 2011 - DNA, 16 bp, Artificial sequence
  Synthetic oligonucleotide
tggactatgaccacaa

SEQ ID NO: 2012 - DNA, 16 bp, Artificial sequence
  Synthetic oligonucleotide
aaaactagagagggtg

SEQ ID NO: 2013 - DNA, 16 bp, Artificial sequence
  Synthetic oligonucleotide
atagaaaatgacggga

SEQ ID NO: 2014 - DNA, 16 bp, Artificial sequence
  Synthetic oligonucleotide
ctttcaaacggattta

SEQ ID NO: 2015 - DNA, 16 bp, Artificial sequence
  Synthetic oligonucleotide
taagaattgctcttgg

SEQ ID NO: 2016 - DNA, 16 bp, Artificial sequence
  Synthetic oligonucleotide
ctcacaaaggcgatga

SEQ ID NO: 2017 - DNA, 16 bp, Artificial sequence
  Synthetic oligonucleotide
atcaaacctagtgtga

SEQ ID NO: 2018 - DNA, 16 bp, Artificial sequence
  Synthetic oligonucleotide
tgcaagctattatctg

SEQ ID NO: 2019 - DNA, 16 bp, Artificial sequence
  Synthetic oligonucleotide
atgcagcactctattg

SEQ ID NO: 2020 - DNA, 16 bp, Artificial sequence
  Synthetic oligonucleotide
gtaatgacactatatg

SEQ ID NO: 2021 - DNA, 16 bp, Artificial sequence
  Synthetic oligonucleotide
ctactacgagacctca

SEQ ID NO: 2022 - DNA, 16 bp, Artificial sequence
  Synthetic oligonucleotide
tctataggtatggaaa

SEQ ID NO: 2023 - DNA, 16 bp, Artificial sequence
  Synthetic oligonucleotide
atcaaagcccagtaga

SEQ ID NO: 2024 - DNA, 16 bp, Artificial sequence
  Synthetic oligonucleotide
taacactcaaccgtcc

SEQ ID NO: 2025 - DNA, 16 bp, Artificial sequence
  Synthetic oligonucleotide
tcggaattctgcactt

SEQ ID NO: 2026 - DNA, 16 bp, Artificial sequence
  Synthetic oligonucleotide
gacaaagtcatgcgct

SEQ ID NO: 2027 - DNA, 16 bp, Artificial sequence
  Synthetic oligonucleotide
acttaagccacctttg

SEQ ID NO: 2028 - DNA, 16 bp, Artificial sequence
  Synthetic oligonucleotide
agcttaaccgtgataa

SEQ ID NO: 2029 - DNA, 16 bp, Artificial sequence
  Synthetic oligonucleotide
cccaatagtttaatca

SEQ ID NO: 2030 - DNA, 16 bp, Artificial sequence
  Synthetic oligonucleotide
ctcgaaaccagaggcg

SEQ ID NO: 2031 - DNA, 16 bp, Artificial sequence
  Synthetic oligonucleotide
cagcaaggcgagaact

SEQ ID NO: 2032 - DNA, 16 bp, Artificial sequence
  Synthetic oligonucleotide
agccaggacacgaacc

SEQ ID NO: 2033 - DNA, 16 bp, Artificial sequence
  Synthetic oligonucleotide
ctgcaacggaacatct

SEQ ID NO: 2034 - DNA, 16 bp, Artificial sequence
  Synthetic oligonucleotide
tgttaaactaagtcac

SEQ ID NO: 2035 - DNA, 16 bp, Artificial sequence
  Synthetic oligonucleotide
gcgaaaagcacccgca

SEQ ID NO: 2036 - DNA, 16 bp, Artificial sequence
  Synthetic oligonucleotide
gaggagaaatacgatc

SEQ ID NO: 2037 - DNA, 16 bp, Artificial sequence
  Synthetic oligonucleotide
caagattaagcactgt

SEQ ID NO: 2038 - DNA, 16 bp, Artificial sequence
  Synthetic oligonucleotide
cctcacggaaagcaac

SEQ ID NO: 2039 - DNA, 16 bp, Artificial sequence
  Synthetic oligonucleotide
cacaaatcgatgtcaa

SEQ ID NO: 2040 - DNA, 16 bp, Artificial sequence
  Synthetic oligonucleotide
tacaatatcataacga

SEQ ID NO: 2041 - DNA, 16 bp, Artificial sequence
  Synthetic oligonucleotide
taattaggtttgtgct

SEQ ID NO: 2042 - DNA, 16 bp, Artificial sequence
  Synthetic oligonucleotide
aatataccgatgcatt

SEQ ID NO: 2043 - DNA, 16 bp, Artificial sequence
  Synthetic oligonucleotide
acccaaagcattgatc

SEQ ID NO: 2044 - DNA, 16 bp, Artificial sequence
  Synthetic oligonucleotide
aggtaataagttcccc

SEQ ID NO: 2045 - DNA, 16 bp, Artificial sequence
  Synthetic oligonucleotide
gcacatcaggcatgaa

SEQ ID NO: 2046 - DNA, 16 bp, Artificial sequence
  Synthetic oligonucleotide
aaaagaacacgcatta

SEQ ID NO: 2047 - DNA, 16 bp, Artificial sequence
  Synthetic oligonucleotide
ctggataatagtaagc

SEQ ID NO: 2048 - DNA, 16 bp, Artificial sequence
  Synthetic oligonucleotide
agatagtgggaagctc

SEQ ID NO: 2049 - DNA, 16 bp, Artificial sequence
  Synthetic oligonucleotide
ttacaaacctgttcta

SEQ ID NO: 2050 - DNA, 16 bp, Artificial sequence
  Synthetic oligonucleotide
aaggatagtgcaaata

SEQ ID NO: 2051 - DNA, 16 bp, Artificial sequence
  Synthetic oligonucleotide
cacaaggacagcgaga

SEQ ID NO: 2052 - DNA, 16 bp, Artificial sequence
  Synthetic oligonucleotide
gaaaagagtaaggtgc

SEQ ID NO: 2053 - DNA, 16 bp, Artificial sequence
  Synthetic oligonucleotide
acatactaagttcctg

SEQ ID NO: 2054 - DNA, 16 bp, Artificial sequence
  Synthetic oligonucleotide
gtttacatgatctatg

SEQ ID NO: 2055 - DNA, 16 bp, Artificial sequence
  Synthetic oligonucleotide
tgccataagttatttc

SEQ ID NO: 2056 - DNA, 16 bp, Artificial sequence
  Synthetic oligonucleotide
cacaacatatgcttct

SEQ ID NO: 2057 - DNA, 16 bp, Artificial sequence
  Synthetic oligonucleotide
gatgaaggcttacact

SEQ ID NO: 2058 - DNA, 16 bp, Artificial sequence
  Synthetic oligonucleotide
aactaatcattccgca

SEQ ID NO: 2059 - DNA, 16 bp, Artificial sequence
  Synthetic oligonucleotide
ctacatctagctctta

SEQ ID NO: 2060 - DNA, 16 bp, Artificial sequence
  Synthetic oligonucleotide
actaaaacgagtgaga

SEQ ID NO: 2061 - DNA, 16 bp, Artificial sequence
  Synthetic oligonucleotide
cagtaaaataacgagc

SEQ ID NO: 2062 - DNA, 16 bp, Artificial sequence
  Synthetic oligonucleotide
ttacatgagtgactta

SEQ ID NO: 2063 - DNA, 16 bp, Artificial sequence
  Synthetic oligonucleotide
taacaacggaggacag

SEQ ID NO: 2064 - DNA, 16 bp, Artificial sequence
  Synthetic oligonucleotide
acgataagggaaccag

SEQ ID NO: 2065 - DNA, 16 bp, Artificial sequence
  Synthetic oligonucleotide
gctataggttctgaaa

SEQ ID NO: 2066 - DNA, 16 bp, Artificial sequence
  Synthetic oligonucleotide
gaaacatgatcagacg

SEQ ID NO: 2067 - DNA, 16 bp, Artificial sequence
  Synthetic oligonucleotide
aatatagttcgatgga

SEQ ID NO: 2068 - DNA, 16 bp, Artificial sequence
  Synthetic oligonucleotide
acccaagacagttaat

SEQ ID NO: 2069 - DNA, 16 bp, Artificial sequence
  Synthetic oligonucleotide
agcgactaactacaca

SEQ ID NO: 2070 - DNA, 16 bp, Artificial sequence
  Synthetic oligonucleotide
tcccaatgcacccgcg

SEQ ID NO: 2071 - DNA, 16 bp, Artificial sequence
  Synthetic oligonucleotide
cattattggagtcacg

SEQ ID NO: 2072 - DNA, 16 bp, Artificial sequence
  Synthetic oligonucleotide
ttgtaactctgatagg

SEQ ID NO: 2073 - DNA, 16 bp, Artificial sequence
  Synthetic oligonucleotide
tggatagcatggtctg

SEQ ID NO: 2074 - DNA, 16 bp, Artificial sequence
  Synthetic oligonucleotide
gttagaggacatgcat

SEQ ID NO: 2075 - DNA, 16 bp, Artificial sequence
  Synthetic oligonucleotide
agccgacatgggacct

SEQ ID NO: 2076 - DNA, 16 bp, Artificial sequence
  Synthetic oligonucleotide
cagcaacgacattctg

SEQ ID NO: 2077 - DNA, 16 bp, Artificial sequence
  Synthetic oligonucleotide
gagaaatacgatcttc

SEQ ID NO: 2078 - DNA, 16 bp, Artificial sequence
  Synthetic oligonucleotide
gtatttccgtggcctt

SEQ ID NO: 2079 - DNA, 16 bp, Artificial sequence
  Synthetic oligonucleotide
tgtcagtagcgagtac

SEQ ID NO: 2080 - DNA, 16 bp, Artificial sequence
  Synthetic oligonucleotide
gcaatgagcatagttc

SEQ ID NO: 2081 - DNA, 16 bp, Artificial sequence
  Synthetic oligonucleotide
agtcaaagtcagttag

SEQ ID NO: 2082 - DNA, 16 bp, Artificial sequence
  Synthetic oligonucleotide
cttgaatcatggatga

SEQ ID NO: 2083 - DNA, 16 bp, Artificial sequence
  Synthetic oligonucleotide
attcaggtagattccg

SEQ ID NO: 2084 - DNA, 16 bp, Artificial sequence
  Synthetic oligonucleotide
ccgagatgttcatatg

SEQ ID NO: 2085 - DNA, 16 bp, Artificial sequence
  Synthetic oligonucleotide
ttcaatagcagggcaa

SEQ ID NO: 2086 - DNA, 16 bp, Artificial sequence
  Synthetic oligonucleotide
agagattatgggttgg

SEQ ID NO: 2087 - DNA, 16 bp, Artificial sequence
  Synthetic oligonucleotide
atagattccaggtcat

SEQ ID NO: 2088 - DNA, 16 bp, Artificial sequence
  Synthetic oligonucleotide
gtagagtcatctagaa

SEQ ID NO: 2089 - DNA, 16 bp, Artificial sequence
  Synthetic oligonucleotide
atgatatgcttgcaat

SEQ ID NO: 2090 - DNA, 16 bp, Artificial sequence
  Synthetic oligonucleotide
catagaaaatgacggg

SEQ ID NO: 2091 - DNA, 16 bp, Artificial sequence
  Synthetic oligonucleotide
aaggatatcaatctcc

SEQ ID NO: 2092 - DNA, 16 bp, Artificial sequence
  Synthetic oligonucleotide
cactttgacatccata

SEQ ID NO: 2093 - DNA, 16 bp, Artificial sequence
  Synthetic oligonucleotide
attcatgcggaaagca

SEQ ID NO: 2094 - DNA, 16 bp, Artificial sequence
  Synthetic oligonucleotide
atttagatcaaaccta

SEQ ID NO: 2095 - DNA, 16 bp, Artificial sequence
  Synthetic oligonucleotide
gttggattcgacatgc

SEQ ID NO: 2096 - DNA, 16 bp, Artificial sequence
  Synthetic oligonucleotide
aattgatgtcagtggg

SEQ ID NO: 2097 - DNA, 16 bp, Artificial sequence
  Synthetic oligonucleotide
cgtaatgacactatat

SEQ ID NO: 2098 - DNA, 16 bp, Artificial sequence
  Synthetic oligonucleotide
actactacgagacctc

SEQ ID NO: 2099 - DNA, 16 bp, Artificial sequence
  Synthetic oligonucleotide
ctctataggtatggaa

SEQ ID NO: 2100 - DNA, 16 bp, Artificial sequence
  Synthetic oligonucleotide
agtcaatcaaagccca

SEQ ID NO: 2101 - DNA, 16 bp, Artificial sequence
  Synthetic oligonucleotide
gtgtaacactcaaccg

SEQ ID NO: 2102 - DNA, 16 bp, Artificial sequence
  Synthetic oligonucleotide
acattcggaattctgc

SEQ ID NO: 2103 - DNA, 16 bp, Artificial sequence
  Synthetic oligonucleotide
ttgactgggattaaca

SEQ ID NO: 2104 - DNA, 16 bp, Artificial sequence
  Synthetic oligonucleotide
gacttaagccaccttt

SEQ ID NO: 2105 - DNA, 16 bp, Artificial sequence
  Synthetic oligonucleotide
ctaagcttaaccgtga

SEQ ID NO: 2106 - DNA, 16 bp, Artificial sequence
  Synthetic oligonucleotide
atatattgggtgctac

SEQ ID NO: 2107 - DNA, 16 bp, Artificial sequence
  Synthetic oligonucleotide
cttaaatgcgcctcaa

SEQ ID NO: 2108 - DNA, 16 bp, Artificial sequence
  Synthetic oligonucleotide
aagtaatgcggtcctc

SEQ ID NO: 2109 - DNA, 16 bp, Artificial sequence
  Synthetic oligonucleotide
aaaagaatggctcgag

SEQ ID NO: 2110 - DNA, 16 bp, Artificial sequence
  Synthetic oligonucleotide
cactagcggaaggccc

SEQ ID NO: 2111 - DNA, 16 bp, Artificial sequence
  Synthetic oligonucleotide
tactatagtagaagga

SEQ ID NO: 2112 - DNA, 16 bp, Artificial sequence
  Synthetic oligonucleotide
tggcgaaaagcacccg

SEQ ID NO: 2113 - DNA, 16 bp, Artificial sequence
  Synthetic oligonucleotide
ccttaatttgaccctc

SEQ ID NO: 2114 - DNA, 16 bp, Artificial sequence
  Synthetic oligonucleotide
gacaagattaagcact

SEQ ID NO: 2115 - DNA, 16 bp, Artificial sequence
  Synthetic oligonucleotide
ttagattaagcctgag

SEQ ID NO: 2116 - DNA, 16 bp, Artificial sequence
  Synthetic oligonucleotide
ctagatgttagactgc

SEQ ID NO: 2117 - DNA, 16 bp, Artificial sequence
  Synthetic oligonucleotide
ggccggagaggcactg

SEQ ID NO: 2118 - DNA, 16 bp, Artificial sequence
  Synthetic oligonucleotide
caatgaacggcctctg

SEQ ID NO: 2119 - DNA, 16 bp, Artificial sequence
  Synthetic oligonucleotide
aaatataccgatgcat

SEQ ID NO: 2120 - DNA, 16 bp, Artificial sequence
  Synthetic oligonucleotide
gataaacaagtctggg

SEQ ID NO: 2121 - DNA, 16 bp, Artificial sequence
  Synthetic oligonucleotide
ctcaatagagttgaag

SEQ ID NO: 2122 - DNA, 16 bp, Artificial sequence
  Synthetic oligonucleotide
tgcttatgcagctggg

SEQ ID NO: 2123 - DNA, 16 bp, Artificial sequence
  Synthetic oligonucleotide
taatagagttctcctc

SEQ ID NO: 2124 - DNA, 16 bp, Artificial sequence
  Synthetic oligonucleotide
agccactgaggtacct

SEQ ID NO: 2125 - DNA, 16 bp, Artificial sequence
  Synthetic oligonucleotide
ataagagctgctgaca

SEQ ID NO: 2126 - DNA, 16 bp, Artificial sequence
  Synthetic oligonucleotide
gtcaattacaaacctg

SEQ ID NO: 2127 - DNA, 16 bp, Artificial sequence
  Synthetic oligonucleotide
ttaaaggatagtgcaa

SEQ ID NO: 2128 - DNA, 16 bp, Artificial sequence
  Synthetic oligonucleotide
acacaaggacagcgag

SEQ ID NO: 2129 - DNA, 16 bp, Artificial sequence
  Synthetic oligonucleotide
tcgcatcattaacaaa

SEQ ID NO: 2130 - DNA, 16 bp, Artificial sequence
  Synthetic oligonucleotide
catcaacaagttagac

SEQ ID NO: 2131 - DNA, 16 bp, Artificial sequence
  Synthetic oligonucleotide
taatagatacacctaa

SEQ ID NO: 2132 - DNA, 16 bp, Artificial sequence
  Synthetic oligonucleotide
tacaattgagctcttt

SEQ ID NO: 2133 - DNA, 16 bp, Artificial sequence
  Synthetic oligonucleotide
aagcacaacatatgct

SEQ ID NO: 2134 - DNA, 16 bp, Artificial sequence
  Synthetic oligonucleotide
caccagacgggatgaa

SEQ ID NO: 2135 - DNA, 16 bp, Artificial sequence
  Synthetic oligonucleotide
ttctactaaactaatc

SEQ ID NO: 2136 - DNA, 16 bp, Artificial sequence
  Synthetic oligonucleotide
tatgaatttggaccac

SEQ ID NO: 2137 - DNA, 16 bp, Artificial sequence
  Synthetic oligonucleotide
aactaaaacgagtgag

SEQ ID NO: 2138 - DNA, 16 bp, Artificial sequence
  Synthetic oligonucleotide
ataagaagtacctcac

SEQ ID NO: 2139 - DNA, 16 bp, Artificial sequence
  Synthetic oligonucleotide
tcgcaatacctaggag

SEQ ID NO: 2140 - DNA, 16 bp, Artificial sequence
  Synthetic oligonucleotide
ttaacaacggaggaca

SEQ ID NO: 2141 - DNA, 16 bp, Artificial sequence
  Synthetic oligonucleotide
cacgataagggaacca

SEQ ID NO: 2142 - DNA, 16 bp, Artificial sequence
  Synthetic oligonucleotide
ggctataggttctgaa

SEQ ID NO: 2143 - DNA, 16 bp, Artificial sequence
  Synthetic oligonucleotide
cactaagggtcaggaa

SEQ ID NO: 2144 - DNA, 16 bp, Artificial sequence
  Synthetic oligonucleotide
caatatagttcgatgg

SEQ ID NO: 2145 - DNA, 16 bp, Artificial sequence
  Synthetic oligonucleotide
caatagatgtaccctg

SEQ ID NO: 2146 - DNA, 16 bp, Artificial sequence
  Synthetic oligonucleotide
tgttaacagagtgcta

SEQ ID NO: 2147 - DNA, 16 bp, Artificial sequence
  Synthetic oligonucleotide
gctcaaactgatggcc

SEQ ID NO: 2148 - DNA, 16 bp, Artificial sequence
  Synthetic oligonucleotide
ctacaagtgagtggtg

SEQ ID NO: 2149 - DNA, 16 bp, Artificial sequence
  Synthetic oligonucleotide
gtcaatctgtaacatg

SEQ ID NO: 2150 - DNA, 16 bp, Artificial sequence
  Synthetic oligonucleotide
ctaaagtagcttgtaa

SEQ ID NO: 2151 - DNA, 16 bp, Artificial sequence
  Synthetic oligonucleotide
tactggatagcatggt

SEQ ID NO: 2152 - DNA, 16 bp, Artificial sequence
  Synthetic oligonucleotide
cttaaatagagacctg

SEQ ID NO: 2153 - DNA, 16 bp, Artificial sequence
  Synthetic oligonucleotide
ataaagccgacatggg

SEQ ID NO: 2154 - DNA, 16 bp, Artificial sequence
  Synthetic oligonucleotide
gtgaatcacaatgatg

SEQ ID NO: 2155 - DNA, 16 bp, Artificial sequence
  Synthetic oligonucleotide
cgctatggcctaccca

SEQ ID NO: 2156 - DNA, 16 bp, Artificial sequence
  Synthetic oligonucleotide
agctgtatttccgtgg

SEQ ID NO: 2157 - DNA, 16 bp, Artificial sequence
  Synthetic oligonucleotide
cgcaatgagcatagtt

SEQ ID NO: 2158 - DNA, 16 bp, Artificial sequence
  Synthetic oligonucleotide
gcggagtcaaagtcag

SEQ ID NO: 2159 - DNA, 16 bp, Artificial sequence
  Synthetic oligonucleotide
ttgtaaataggtgtag

SEQ ID NO: 2160 - DNA, 16 bp, Artificial sequence
  Synthetic oligonucleotide
cacgagagttgttcaa

SEQ ID NO: 2161 - DNA, 16 bp, Artificial sequence
  Synthetic oligonucleotide
cccgagatgttcatat

SEQ ID NO: 2162 - DNA, 16 bp, Artificial sequence
  Synthetic oligonucleotide
attcaatagcagggca

SEQ ID NO: 2163 - DNA, 16 bp, Artificial sequence
  Synthetic oligonucleotide
gtagagattatgggtt

SEQ ID NO: 2164 - DNA, 16 bp, Artificial sequence
  Synthetic oligonucleotide
actatagattccaggt

SEQ ID NO: 2165 - DNA, 16 bp, Artificial sequence
  Synthetic oligonucleotide
caacattgaataccct

SEQ ID NO: 2166 - DNA, 16 bp, Artificial sequence
  Synthetic oligonucleotide
gtcaatgatatgcttg

SEQ ID NO: 2167 - DNA, 16 bp, Artificial sequence
  Synthetic oligonucleotide
ttatcaggagacttgt

SEQ ID NO: 2168 - DNA, 16 bp, Artificial sequence
  Synthetic oligonucleotide
gaaggatatcaatctc

SEQ ID NO: 2169 - DNA, 16 bp, Artificial sequence
  Synthetic oligonucleotide
agctaactttgataca

SEQ ID NO: 2170 - DNA, 16 bp, Artificial sequence
  Synthetic oligonucleotide
tatgattcatgcggaa

SEQ ID NO: 2171 - DNA, 16 bp, Artificial sequence
  Synthetic oligonucleotide
tatttagatcaaacct

SEQ ID NO: 2172 - DNA, 16 bp, Artificial sequence
  Synthetic oligonucleotide
aagcaggttggattcg

SEQ ID NO: 2173 - DNA, 16 bp, Artificial sequence
  Synthetic oligonucleotide
tgtcaaattgatgtca

SEQ ID NO: 2174 - DNA, 16 bp, Artificial sequence
  Synthetic oligonucleotide
taatatcagcagaaca

SEQ ID NO: 2175 - DNA, 16 bp, Artificial sequence
  Synthetic oligonucleotide
aactactacgagacct

SEQ ID NO: 2176 - DNA, 16 bp, Artificial sequence
  Synthetic oligonucleotide
tctctataggtatgga

SEQ ID NO: 2177 - DNA, 16 bp, Artificial sequence
  Synthetic oligonucleotide
caacagtcaatcaaag

SEQ ID NO: 2178 - DNA, 16 bp, Artificial sequence
  Synthetic oligonucleotide
agccgaaacagctcag

SEQ ID NO: 2179 - DNA, 16 bp, Artificial sequence
  Synthetic oligonucleotide
tacattcggaattctg

SEQ ID NO: 2180 - DNA, 16 bp, Artificial sequence
  Synthetic oligonucleotide
gggcatgcacgcttgt

SEQ ID NO: 2181 - DNA, 16 bp, Artificial sequence
  Synthetic oligonucleotide
gtatttgacttaagcc

SEQ ID NO: 2182 - DNA, 16 bp, Artificial sequence
  Synthetic oligonucleotide
aggagataccagattc

SEQ ID NO: 2183 - DNA, 16 bp, Artificial sequence
  Synthetic oligonucleotide
catatattgggtgcta

SEQ ID NO: 2184 - DNA, 16 bp, Artificial sequence
  Synthetic oligonucleotide
tttaacgggaacaacg

SEQ ID NO: 2185 - DNA, 16 bp, Artificial sequence
  Synthetic oligonucleotide
cccaagtaatgcggtc

SEQ ID NO: 2186 - DNA, 16 bp, Artificial sequence
  Synthetic oligonucleotide
gaaaagaatggctcga

SEQ ID NO: 2187 - DNA, 16 bp, Artificial sequence
  Synthetic oligonucleotide
gcgcactagcggaagg

SEQ ID NO: 2188 - DNA, 16 bp, Artificial sequence
  Synthetic oligonucleotide
gtttactatagtagaa

SEQ ID NO: 2189 - DNA, 16 bp, Artificial sequence
  Synthetic oligonucleotide
agggatggcgaaaagc

SEQ ID NO: 2190 - DNA, 16 bp, Artificial sequence
  Synthetic oligonucleotide
atatactggatctatg

SEQ ID NO: 2191 - DNA, 16 bp, Artificial sequence
  Synthetic oligonucleotide
agacaagattaagcac

SEQ ID NO: 2192 - DNA, 16 bp, Artificial sequence
  Synthetic oligonucleotide
atttagattaagcctg

SEQ ID NO: 2193 - DNA, 16 bp, Artificial sequence
  Synthetic oligonucleotide
caaactacacaaccta

SEQ ID NO: 2194 - DNA, 16 bp, Artificial sequence
  Synthetic oligonucleotide
tccaagggagtgattc

SEQ ID NO: 2195 - DNA, 16 bp, Artificial sequence
  Synthetic oligonucleotide
gaccaatgaacggcct

SEQ ID NO: 2196 - DNA, 16 bp, Artificial sequence
  Synthetic oligonucleotide
aaaatataccgatgca

SEQ ID NO: 2197 - DNA, 16 bp, Artificial sequence
  Synthetic oligonucleotide
tgataaacaagtctgg

SEQ ID NO: 2198 - DNA, 16 bp, Artificial sequence
  Synthetic oligonucleotide
gctcaatagagttgaa

SEQ ID NO: 2199 - DNA, 16 bp, Artificial sequence
  Synthetic oligonucleotide
gactactagtttttcc

SEQ ID NO: 2200 - DNA, 16 bp, Artificial sequence
  Synthetic oligonucleotide
cgcttagttttaagat

SEQ ID NO: 2201 - DNA, 16 bp, Artificial sequence
  Synthetic oligonucleotide
taacacgcagccactg

SEQ ID NO: 2202 - DNA, 16 bp, Artificial sequence
  Synthetic oligonucleotide
gtataagagctgctga

SEQ ID NO: 2203 - DNA, 16 bp, Artificial sequence
  Synthetic oligonucleotide
tgtcaattacaaacct

SEQ ID NO: 2204 - DNA, 16 bp, Artificial sequence
  Synthetic oligonucleotide
gtcataatgatcaaac

SEQ ID NO: 2205 - DNA, 16 bp, Artificial sequence
  Synthetic oligonucleotide
ctacacaaggacagcg

SEQ ID NO: 2206 - DNA, 16 bp, Artificial sequence
  Synthetic oligonucleotide
gacaatacatagtgtt

SEQ ID NO: 2207 - DNA, 16 bp, Artificial sequence
  Synthetic oligonucleotide
aaagagtgaactacac

SEQ ID NO: 2208 - DNA, 16 bp, Artificial sequence
  Synthetic oligonucleotide
ataatagatacaccta

SEQ ID NO: 2209 - DNA, 16 bp, Artificial sequence
  Synthetic oligonucleotide
ttacaattgagctctt

SEQ ID NO: 2210 - DNA, 16 bp, Artificial sequence
  Synthetic oligonucleotide
aaattaggttaactgt

SEQ ID NO: 2211 - DNA, 16 bp, Artificial sequence
  Synthetic oligonucleotide
gacaacccgtattttt

SEQ ID NO: 2212 - DNA, 16 bp, Artificial sequence
  Synthetic oligonucleotide
gcataatgtaatctac

SEQ ID NO: 2213 - DNA, 16 bp, Artificial sequence
  Synthetic oligonucleotide
tggtacatatgaagtt

SEQ ID NO: 2214 - DNA, 16 bp, Artificial sequence
  Synthetic oligonucleotide
caaactaaaacgagtg

SEQ ID NO: 2215 - DNA, 16 bp, Artificial sequence
  Synthetic oligonucleotide
gtaaatcagttccaat

SEQ ID NO: 2216 - DNA, 16 bp, Artificial sequence
  Synthetic oligonucleotide
ttaaatcgcaatacct

SEQ ID NO: 2217 - DNA, 16 bp, Artificial sequence
  Synthetic oligonucleotide
attaacaacggaggac

SEQ ID NO: 2218 - DNA, 16 bp, Artificial sequence
  Synthetic oligonucleotide
acacgataagggaacc

SEQ ID NO: 2219 - DNA, 16 bp, Artificial sequence
  Synthetic oligonucleotide
aggaatagatggctat

SEQ ID NO: 2220 - DNA, 16 bp, Artificial sequence
  Synthetic oligonucleotide
ataataggctgattag

SEQ ID NO: 2221 - DNA, 16 bp, Artificial sequence
  Synthetic oligonucleotide
tcaatatagttcgatg

SEQ ID NO: 2222 - DNA, 16 bp, Artificial sequence
  Synthetic oligonucleotide
agcaatagatgtaccc

SEQ ID NO: 2223 - DNA, 16 bp, Artificial sequence
  Synthetic oligonucleotide
ggttaattgttgattg

SEQ ID NO: 2224 - DNA, 16 bp, Artificial sequence
  Synthetic oligonucleotide
tggatatgcaggtggg

SEQ ID NO: 2225 - DNA, 16 bp, Artificial sequence
  Synthetic oligonucleotide
aatctatatgccactc

SEQ ID NO: 2226 - DNA, 16 bp, Artificial sequence
  Synthetic oligonucleotide
cactaaagtagcttgt

SEQ ID NO: 2227 - DNA, 16 bp, Artificial sequence
  Synthetic oligonucleotide
ccgactactggatagc

SEQ ID NO: 2228 - DNA, 16 bp, Artificial sequence
  Synthetic oligonucleotide
gcttaaatagagacct

SEQ ID NO: 2229 - DNA, 16 bp, Artificial sequence
  Synthetic oligonucleotide
cataaagccgacatgg

SEQ ID NO: 2230 - DNA, 16 bp, Artificial sequence
  Synthetic oligonucleotide
gtagagtgaatcacaa

SEQ ID NO: 2231 - DNA, 16 bp, Artificial sequence
  Synthetic oligonucleotide
catcaatcgctatggc

SEQ ID NO: 2232 - DNA, 16 bp, Artificial sequence
  Synthetic oligonucleotide
gtattactgggtactg

SEQ ID NO: 2233 - DNA, 16 bp, Artificial sequence
  Synthetic oligonucleotide
tgtcaatctgtaacat

SEQ ID NO: 2234 - DNA, 16 bp, Artificial sequence
  Synthetic oligonucleotide
aaatggttcgcaatga

SEQ ID NO: 2235 - DNA, 16 bp, Artificial sequence
  Synthetic oligonucleotide
ggcaggcggagtcaaa

SEQ ID NO: 2236 - DNA, 16 bp, Artificial sequence
  Synthetic oligonucleotide
aaagtattccacacca

SEQ ID NO: 2237 - DNA, 16 bp, Artificial sequence
  Synthetic oligonucleotide
acacgagagttgttca

SEQ ID NO: 2238 - DNA, 16 bp, Artificial sequence
  Synthetic oligonucleotide
ccccgagatgttcata

SEQ ID NO: 2239 - DNA, 16 bp, Artificial sequence
  Synthetic oligonucleotide
tagtaagtggtcatct

SEQ ID NO: 2240 - DNA, 16 bp, Artificial sequence
  Synthetic oligonucleotide
caacacattccgtcct

SEQ ID NO: 2241 - DNA, 16 bp, Artificial sequence
  Synthetic oligonucleotide
agactatagattccag

SEQ ID NO: 2242 - DNA, 16 bp, Artificial sequence
  Synthetic oligonucleotide
cacaacattgaatacc

SEQ ID NO: 2243 - DNA, 16 bp, Artificial sequence
  Synthetic oligonucleotide
agtcaatgatatgctt

SEQ ID NO: 2244 - DNA, 16 bp, Artificial sequence
  Synthetic oligonucleotide
ggatttatcaggagac

SEQ ID NO: 2245 - DNA, 16 bp, Artificial sequence
  Synthetic oligonucleotide
tgaaggatatcaatct

SEQ ID NO: 2246 - DNA, 16 bp, Artificial sequence
  Synthetic oligonucleotide
ggtattccagctaact

SEQ ID NO: 2247 - DNA, 16 bp, Artificial sequence
  Synthetic oligonucleotide
ctatgattcatgcgga

SEQ ID NO: 2248 - DNA, 16 bp, Artificial sequence
  Synthetic oligonucleotide
ctatttagatcaaacc

SEQ ID NO: 2249 - DNA, 16 bp, Artificial sequence
  Synthetic oligonucleotide
cttaacaactactcaa

SEQ ID NO: 2250 - DNA, 16 bp, Artificial sequence
  Synthetic oligonucleotide
gccaaagttgtgtcaa

SEQ ID NO: 2251 - DNA, 16 bp, Artificial sequence
  Synthetic oligonucleotide
ctcaacatatacctaa

SEQ ID NO: 2252 - DNA, 16 bp, Artificial sequence
  Synthetic oligonucleotide
gaaactactacgagac

SEQ ID NO: 2253 - DNA, 16 bp, Artificial sequence
  Synthetic oligonucleotide
aggtatgctctctata

SEQ ID NO: 2254 - DNA, 16 bp, Artificial sequence
  Synthetic oligonucleotide
attaaggagacctctc

SEQ ID NO: 2255 - DNA, 16 bp, Artificial sequence
  Synthetic oligonucleotide
cttaaagccgaaacag

SEQ ID NO: 2256 - DNA, 16 bp, Artificial sequence
  Synthetic oligonucleotide
ttacattcggaattct

SEQ ID NO: 2257 - DNA, 16 bp, Artificial sequence
  Synthetic oligonucleotide
ccgggcatgcacgctt

SEQ ID NO: 2258 - DNA, 16 bp, Artificial sequence
  Synthetic oligonucleotide
caagataagtgagaca

SEQ ID NO: 2259 - DNA, 16 bp, Artificial sequence
  Synthetic oligonucleotide
actaagaggagatacc

SEQ ID NO: 2260 - DNA, 16 bp, Artificial sequence
  Synthetic oligonucleotide
acataataagggccca

SEQ ID NO: 2261 - DNA, 16 bp, Artificial sequence
  Synthetic oligonucleotide
ctttaacgggaacaac

SEQ ID NO: 2262 - DNA, 16 bp, Artificial sequence
  Synthetic oligonucleotide
tcccaagtaatgcggt

SEQ ID NO: 2263 - DNA, 16 bp, Artificial sequence
  Synthetic oligonucleotide
agccagagtagtgtgg

SEQ ID NO: 2264 - DNA, 16 bp, Artificial sequence
  Synthetic oligonucleotide
agctaacccagcccag

SEQ ID NO: 2265 - DNA, 16 bp, Artificial sequence
  Synthetic oligonucleotide
acgattatgtgcagag

SEQ ID NO: 2266 - DNA, 16 bp, Artificial sequence
  Synthetic oligonucleotide
aatcagatagatatcc

SEQ ID NO: 2267 - DNA, 16 bp, Artificial sequence
  Synthetic oligonucleotide
atatatactggatcta

SEQ ID NO: 2268 - DNA, 16 bp, Artificial sequence
  Synthetic oligonucleotide
agaaaccggatgctgt

SEQ ID NO: 2269 - DNA, 16 bp, Artificial sequence
  Synthetic oligonucleotide
agataaccactactgg

SEQ ID NO: 2270 - DNA, 16 bp, Artificial sequence
  Synthetic oligonucleotide
cacgaggcagataagg

SEQ ID NO: 2271 - DNA, 16 bp, Artificial sequence
  Synthetic oligonucleotide
tcctaatcctaaccag

SEQ ID NO: 2272 - DNA, 16 bp, Artificial sequence
  Synthetic oligonucleotide
cccgaagtgggaagtt

SEQ ID NO: 2273 - DNA, 16 bp, Artificial sequence
  Synthetic oligonucleotide
gaaaatataccgatgc

SEQ ID NO: 2274 - DNA, 16 bp, Artificial sequence
  Synthetic oligonucleotide
aattgataaacaagtc

SEQ ID NO: 2275 - DNA, 16 bp, Artificial sequence
  Synthetic oligonucleotide
gtacataggacaggct

SEQ ID NO: 2276 - DNA, 16 bp, Artificial sequence
  Synthetic oligonucleotide
ccagactactagtttt

SEQ ID NO: 2277 - DNA, 16 bp, Artificial sequence
  Synthetic oligonucleotide
gaataattcgcttagt

SEQ ID NO: 2278 - DNA, 16 bp, Artificial sequence
  Synthetic oligonucleotide
agggaataacacgcag

SEQ ID NO: 2279 - DNA, 16 bp, Artificial sequence
  Synthetic oligonucleotide
ggtataagagctgctg

SEQ ID NO: 2280 - DNA, 16 bp, Artificial sequence
  Synthetic oligonucleotide
aaacaagtcagctgta

SEQ ID NO: 2281 - DNA, 16 bp, Artificial sequence
  Synthetic oligonucleotide
gtccaaggtaagggtc

SEQ ID NO: 2282 - DNA, 16 bp, Artificial sequence
  Synthetic oligonucleotide
acaacaagggattttc

SEQ ID NO: 2283 - DNA, 16 bp, Artificial sequence
  Synthetic oligonucleotide
atcatataaaccagtg

SEQ ID NO: 2284 - DNA, 16 bp, Artificial sequence
  Synthetic oligonucleotide
tatatagagagccaca

SEQ ID NO: 2285 - DNA, 16 bp, Artificial sequence
  Synthetic oligonucleotide
agacattgtagctata

SEQ ID NO: 2286 - DNA, 16 bp, Artificial sequence
  Synthetic oligonucleotide
gacaatatcttagatt

SEQ ID NO: 2287 - DNA, 16 bp, Artificial sequence
  Synthetic oligonucleotide
caaattaggttaactg

SEQ ID NO: 2288 - DNA, 16 bp, Artificial sequence
  Synthetic oligonucleotide
acgggaatggctgtta

SEQ ID NO: 2289 - DNA, 16 bp, Artificial sequence
  Synthetic oligonucleotide
ggcataatgtaatcta

SEQ ID NO: 2290 - DNA, 16 bp, Artificial sequence
  Synthetic oligonucleotide
atacaaccctatttac

SEQ ID NO: 2291 - DNA, 16 bp, Artificial sequence
  Synthetic oligonucleotide
catattatcttgaggg

SEQ ID NO: 2292 - DNA, 16 bp, Artificial sequence
  Synthetic oligonucleotide
atacatggtgcaaatt

SEQ ID NO: 2293 - DNA, 16 bp, Artificial sequence
  Synthetic oligonucleotide
acttaaatcgcaatac

SEQ ID NO: 2294 - DNA, 16 bp, Artificial sequence
  Synthetic oligonucleotide
gattaacaacggagga

SEQ ID NO: 2295 - DNA, 16 bp, Artificial sequence
  Synthetic oligonucleotide
tctaattactaacttc

SEQ ID NO: 2296 - DNA, 16 bp, Artificial sequence
  Synthetic oligonucleotide
tgtcaaggaatagatg

SEQ ID NO: 2297 - DNA, 16 bp, Artificial sequence
  Synthetic oligonucleotide
tataataggctgatta

SEQ ID NO: 2298 - DNA, 16 bp, Artificial sequence
  Synthetic oligonucleotide
ttcaatatagttcgat

SEQ ID NO: 2299 - DNA, 16 bp, Artificial sequence
  Synthetic oligonucleotide
aagcaatagatgtacc

SEQ ID NO: 2300 - DNA, 16 bp, Artificial sequence
  Synthetic oligonucleotide
aatcattgcgggttaa

SEQ ID NO: 2301 - DNA, 16 bp, Artificial sequence
  Synthetic oligonucleotide
gatcaaaggcaagctc

SEQ ID NO: 2302 - DNA, 16 bp, Artificial sequence
  Synthetic oligonucleotide
tggaaatctatatgcc

SEQ ID NO: 2303 - DNA, 16 bp, Artificial sequence
  Synthetic oligonucleotide
gcactaaagtagcttg

SEQ ID NO: 2304 - DNA, 16 bp, Artificial sequence
  Synthetic oligonucleotide
gccgactactggatag

SEQ ID NO: 2305 - DNA, 16 bp, Artificial sequence
  Synthetic oligonucleotide
ggcttaaatagagacc

SEQ ID NO: 2306 - DNA, 16 bp, Artificial sequence
  Synthetic oligonucleotide
ccataaagccgacatg

SEQ ID NO: 2307 - DNA, 16 bp, Artificial sequence
  Synthetic oligonucleotide
gattaaggaccccaag

SEQ ID NO: 2308 - DNA, 16 bp, Artificial sequence
  Synthetic oligonucleotide
acatcaatcgctatgg

SEQ ID NO: 2309 - DNA, 16 bp, Artificial sequence
  Synthetic oligonucleotide
taggactgggaccttt

SEQ ID NO: 2310 - DNA, 16 bp, Artificial sequence
  Synthetic oligonucleotide
ccaacggcagaagaca

SEQ ID NO: 2311 - DNA, 16 bp, Artificial sequence
  Synthetic oligonucleotide
taaatggttcgcaatg

SEQ ID NO: 2312 - DNA, 16 bp, Artificial sequence
  Synthetic oligonucleotide
acgagaaggcaggcgg

SEQ ID NO: 2313 - DNA, 16 bp, Artificial sequence
  Synthetic oligonucleotide
aaagagtatgattggg

SEQ ID NO: 2314 - DNA, 16 bp, Artificial sequence
  Synthetic oligonucleotide
tacacgagagttgttc

SEQ ID NO: 2315 - DNA, 16 bp, Artificial sequence
  Synthetic oligonucleotide
ctgtatggaacctccc

SEQ ID NO: 2316 - DNA, 16 bp, Artificial sequence
  Synthetic oligonucleotide
atgataggagaccacc

SEQ ID NO: 2317 - DNA, 16 bp, Artificial sequence
  Synthetic oligonucleotide
acaacacattccgtcc

SEQ ID NO: 2318 - DNA, 16 bp, Artificial sequence
  Synthetic oligonucleotide
ctcgatgggataggaa

SEQ ID NO: 2319 - DNA, 16 bp, Artificial sequence
  Synthetic oligonucleotide
accacaacattgaata

SEQ ID NO: 2320 - DNA, 16 bp, Artificial sequence
  Synthetic oligonucleotide
atgcaatgtgcaggtc

SEQ ID NO: 2321 - DNA, 16 bp, Artificial sequence
  Synthetic oligonucleotide
acggatttatcaggag

SEQ ID NO: 2322 - DNA, 16 bp, Artificial sequence
  Synthetic oligonucleotide
cgatgaaggatatcaa

SEQ ID NO: 2323 - DNA, 16 bp, Artificial sequence
  Synthetic oligonucleotide
aggtattccagctaac

SEQ ID NO: 2324 - DNA, 16 bp, Artificial sequence
  Synthetic oligonucleotide
tgcctatgattcatgc

SEQ ID NO: 2325 - DNA, 16 bp, Artificial sequence
  Synthetic oligonucleotide
ttcgagttcagagaaa

SEQ ID NO: 2326 - DNA, 16 bp, Artificial sequence
  Synthetic oligonucleotide
ttcttaacaactactc

SEQ ID NO: 2327 - DNA, 16 bp, Artificial sequence
  Synthetic oligonucleotide
aaggacattgattgta

SEQ ID NO: 2328 - DNA, 16 bp, Artificial sequence
  Synthetic oligonucleotide
aatgatgtaggctcaa

SEQ ID NO: 2329 - DNA, 16 bp, Artificial sequence
  Synthetic oligonucleotide
agaaactactacgaga

SEQ ID NO: 2330 - DNA, 16 bp, Artificial sequence
  Synthetic oligonucleotide
agaaaggtatgctctc

SEQ ID NO: 2331 - DNA, 16 bp, Artificial sequence
  Synthetic oligonucleotide
agattaaggagacctc

SEQ ID NO: 2332 - DNA, 16 bp, Artificial sequence
  Synthetic oligonucleotide
acttaaagccgaaaca

SEQ ID NO: 2333 - DNA, 16 bp, Artificial sequence
  Synthetic oligonucleotide
tttacattcggaattc

SEQ ID NO: 2334 - DNA, 16 bp, Artificial sequence
  Synthetic oligonucleotide
agataatgcagccctc

SEQ ID NO: 2335 - DNA, 16 bp, Artificial sequence
  Synthetic oligonucleotide
accaagataagtgaga

SEQ ID NO: 2336 - DNA, 16 bp, Artificial sequence
  Synthetic oligonucleotide
gactaagaggagatac

SEQ ID NO: 2337 - DNA, 16 bp, Artificial sequence
  Synthetic oligonucleotide
accgaataagctctag

SEQ ID NO: 2338 - DNA, 16 bp, Artificial sequence
  Synthetic oligonucleotide
cataaaggctctcctc

SEQ ID NO: 2339 - DNA, 16 bp, Artificial sequence
  Synthetic oligonucleotide
cgagaatttcagccgg

SEQ ID NO: 2340 - DNA, 16 bp, Artificial sequence
  Synthetic oligonucleotide
gaggaacggtcctggc

SEQ ID NO: 2341 - DNA, 16 bp, Artificial sequence
  Synthetic oligonucleotide
taaatagagacctgcg

SEQ ID NO: 2342 - DNA, 16 bp, Artificial sequence
  Synthetic oligonucleotide
aacgattatgtgcaga

SEQ ID NO: 2343 - DNA, 16 bp, Artificial sequence
  Synthetic oligonucleotide
ggacaagctcatggag

SEQ ID NO: 2344 - DNA, 16 bp, Artificial sequence
  Synthetic oligonucleotide
catatatactggatct

SEQ ID NO: 2345 - DNA, 16 bp, Artificial sequence
  Synthetic oligonucleotide
gagaaaccggatgctg

SEQ ID NO: 2346 - DNA, 16 bp, Artificial sequence
  Synthetic oligonucleotide
gagataaccactactg

SEQ ID NO: 2347 - DNA, 16 bp, Artificial sequence
  Synthetic oligonucleotide
acacgaggcagataag

SEQ ID NO: 2348 - DNA, 16 bp, Artificial sequence
  Synthetic oligonucleotide
ctcttatacacaatca

SEQ ID NO: 2349 - DNA, 16 bp, Artificial sequence
  Synthetic oligonucleotide
gtcttatatagttctt

SEQ ID NO: 2350 - DNA, 16 bp, Artificial sequence
  Synthetic oligonucleotide
tgaaaatataccgatg

SEQ ID NO: 2351 - DNA, 16 bp, Artificial sequence
  Synthetic oligonucleotide
aggaaattgtctggtg

SEQ ID NO: 2352 - DNA, 16 bp, Artificial sequence
  Synthetic oligonucleotide
ctataactggtccttc

SEQ ID NO: 2353 - DNA, 16 bp, Artificial sequence
  Synthetic oligonucleotide
cacaattacatcctga

SEQ ID NO: 2354 - DNA, 16 bp, Artificial sequence
  Synthetic oligonucleotide
ggaataattcgcttag

SEQ ID NO: 2355 - DNA, 16 bp, Artificial sequence
  Synthetic oligonucleotide
atggagacaactatgt

SEQ ID NO: 2356 - DNA, 16 bp, Artificial sequence
  Synthetic oligonucleotide
cggtataagagctgct

SEQ ID NO: 2357 - DNA, 16 bp, Artificial sequence
  Synthetic oligonucleotide
tagcaaactatctata

SEQ ID NO: 2358 - DNA, 16 bp, Artificial sequence
  Synthetic oligonucleotide
gcgcagtaagagacag

SEQ ID NO: 2359 - DNA, 16 bp, Artificial sequence
  Synthetic oligonucleotide
actcaaagggctagtg

SEQ ID NO: 2360 - DNA, 16 bp, Artificial sequence
  Synthetic oligonucleotide
catcatataaaccagt

SEQ ID NO: 2361 - DNA, 16 bp, Artificial sequence
  Synthetic oligonucleotide
agataattcctcggat

SEQ ID NO: 2362 - DNA, 16 bp, Artificial sequence
  Synthetic oligonucleotide
ctcataagatatggaa

SEQ ID NO: 2363 - DNA, 16 bp, Artificial sequence
  Synthetic oligonucleotide
agacaatatcttagat

SEQ ID NO: 2364 - DNA, 16 bp, Artificial sequence
  Synthetic oligonucleotide
tgcaaattaggttaac

SEQ ID NO: 2365 - DNA, 16 bp, Artificial sequence
  Synthetic oligonucleotide
gtaaagatcacgggaa

SEQ ID NO: 2366 - DNA, 16 bp, Artificial sequence
  Synthetic oligonucleotide
aggcataatgtaatct

SEQ ID NO: 2367 - DNA, 16 bp, Artificial sequence
  Synthetic oligonucleotide
caacatctaaccttgg

SEQ ID NO: 2368 - DNA, 16 bp, Artificial sequence
  Synthetic oligonucleotide
cgcttatgaaactaac

SEQ ID NO: 2369 - DNA, 16 bp, Artificial sequence
  Synthetic oligonucleotide
taatacatggtgcaaa

SEQ ID NO: 2370 - DNA, 16 bp, Artificial sequence
  Synthetic oligonucleotide
tacttaaatcgcaata

SEQ ID NO: 2371 - DNA, 16 bp, Artificial sequence
  Synthetic oligonucleotide
ggattaacaacggagg

SEQ ID NO: 2372 - DNA, 16 bp, Artificial sequence
  Synthetic oligonucleotide
ctctaattactaactt

SEQ ID NO: 2373 - DNA, 16 bp, Artificial sequence
  Synthetic oligonucleotide
caacagatcttgtcaa

SEQ ID NO: 2374 - DNA, 16 bp, Artificial sequence
  Synthetic oligonucleotide
catataataggctgat

SEQ ID NO: 2375 - DNA, 16 bp, Artificial sequence
  Synthetic oligonucleotide
tttcaatatagttcga

SEQ ID NO: 2376 - DNA, 16 bp, Artificial sequence
  Synthetic oligonucleotide
tacaagattgtctgca

SEQ ID NO: 2377 - DNA, 16 bp, Artificial sequence
  Synthetic oligonucleotide
agcgaaatcattgcgg

SEQ ID NO: 2378 - DNA, 16 bp, Artificial sequence
  Synthetic oligonucleotide
gaataaggatgcagcc

SEQ ID NO: 2379 - DNA, 16 bp, Artificial sequence
  Synthetic oligonucleotide
cactacatggccagca

SEQ ID NO: 2380 - DNA, 16 bp, Artificial sequence
  Synthetic oligonucleotide
ttacagtgcccgttat

SEQ ID NO: 2381 - DNA, 16 bp, Artificial sequence
  Synthetic oligonucleotide
gccttaaatgcgcctc

SEQ ID NO: 2382 - DNA, 16 bp, Artificial sequence
  Synthetic oligonucleotide
ctagatcggctctgaa

SEQ ID NO: 2383 - DNA, 16 bp, Artificial sequence
  Synthetic oligonucleotide
cttcatcgccaagaaa

SEQ ID NO: 2384 - DNA, 16 bp, Artificial sequence
  Synthetic oligonucleotide
ggattaaggaccccaa

SEQ ID NO: 2385 - DNA, 16 bp, Artificial sequence
  Synthetic oligonucleotide
taacatcaatcgctat

SEQ ID NO: 2386 - DNA, 16 bp, Artificial sequence
  Synthetic oligonucleotide
tgctacggtcacattc

SEQ ID NO: 2387 - DNA, 16 bp, Artificial sequence
  Synthetic oligonucleotide
ttccaacggcagaaga

SEQ ID NO: 2388 - DNA, 16 bp, Artificial sequence
  Synthetic oligonucleotide
ttaaatggttcgcaat

SEQ ID NO: 2389 - DNA, 16 bp, Artificial sequence
  Synthetic oligonucleotide
aacgagaaggcaggcg

SEQ ID NO: 2390 - DNA, 16 bp, Artificial sequence
  Synthetic oligonucleotide
atggaactgcataggg

SEQ ID NO: 2391 - DNA, 16 bp, Artificial sequence
  Synthetic oligonucleotide
gtacacgagagttgtt

SEQ ID NO: 2392 - DNA, 16 bp, Artificial sequence
  Synthetic oligonucleotide
cacttgacggtccttc

SEQ ID NO: 2393 - DNA, 16 bp, Artificial sequence
  Synthetic oligonucleotide
gatgataggagaccac

SEQ ID NO: 2394 - DNA, 16 bp, Artificial sequence
  Synthetic oligonucleotide
gacaacacattccgtc

SEQ ID NO: 2395 - DNA, 16 bp, Artificial sequence
  Synthetic oligonucleotide
gctcgatgggatagga

SEQ ID NO: 2396 - DNA, 16 bp, Artificial sequence
  Synthetic oligonucleotide
caccacaacattgaat

SEQ ID NO: 2397 - DNA, 16 bp, Artificial sequence
  Synthetic oligonucleotide
tgcaattgcagtcatg

SEQ ID NO: 2398 - DNA, 16 bp, Artificial sequence
  Synthetic oligonucleotide
aacggatttatcagga

SEQ ID NO: 2399 - DNA, 16 bp, Artificial sequence
  Synthetic oligonucleotide
tacgatgaaggatatc

SEQ ID NO: 2400 - DNA, 16 bp, Artificial sequence
  Synthetic oligonucleotide
aaggaatcttcatgtc

SEQ ID NO: 2401 - DNA, 16 bp, Artificial sequence
  Synthetic oligonucleotide
gctaactttgcctatg

SEQ ID NO: 2402 - DNA, 16 bp, Artificial sequence
  Synthetic oligonucleotide
aatgattcgagttcag

SEQ ID NO: 2403 - DNA, 16 bp, Artificial sequence
  Synthetic oligonucleotide
tcatacggtcttctta

SEQ ID NO: 2404 - DNA, 16 bp, Artificial sequence
  Synthetic oligonucleotide
cttatctactatatcc

SEQ ID NO: 2405 - DNA, 16 bp, Artificial sequence
  Synthetic oligonucleotide
aaatgatgtaggctca

SEQ ID NO: 2406 - DNA, 16 bp, Artificial sequence
  Synthetic oligonucleotide
cagaaactactacgag

SEQ ID NO: 2407 - DNA, 16 bp, Artificial sequence
  Synthetic oligonucleotide
aagaaaggtatgctct

SEQ ID NO: 2408 - DNA, 16 bp, Artificial sequence
  Synthetic oligonucleotide
tcataagacatgtgta

SEQ ID NO: 2409 - DNA, 16 bp, Artificial sequence
  Synthetic oligonucleotide
aacttaaagccgaaac

SEQ ID NO: 2410 - DNA, 16 bp, Artificial sequence
  Synthetic oligonucleotide
ttttacattcggaatt

SEQ ID NO: 2411 - DNA, 16 bp, Artificial sequence
  Synthetic oligonucleotide
ccagacgcaggatcag

SEQ ID NO: 2412 - DNA, 16 bp, Artificial sequence
  Synthetic oligonucleotide
taccaagataagtgag

SEQ ID NO: 2413 - DNA, 16 bp, Artificial sequence
  Synthetic oligonucleotide
atccagtatgccgtgt

SEQ ID NO: 2414 - DNA, 16 bp, Artificial sequence
  Synthetic oligonucleotide
atctagcgggctcctc

SEQ ID NO: 2415 - DNA, 16 bp, Artificial sequence
  Synthetic oligonucleotide
gaccataaaggctctc

SEQ ID NO: 2416 - DNA, 16 bp, Artificial sequence
  Synthetic oligonucleotide
tccgagaatttcagcc

SEQ ID NO: 2417 - DNA, 16 bp, Artificial sequence
  Synthetic oligonucleotide
ggcgaggaggctggtt

SEQ ID NO: 2418 - DNA, 16 bp, Artificial sequence
  Synthetic oligonucleotide
aacgaggctgcatcaa

SEQ ID NO: 2419 - DNA, 16 bp, Artificial sequence
  Synthetic oligonucleotide
aaacgattatgtgcag

SEQ ID NO: 2420 - DNA, 16 bp, Artificial sequence
  Synthetic oligonucleotide
agcgagatcaccaccc

SEQ ID NO: 2421 - DNA, 16 bp, Artificial sequence
  Synthetic oligonucleotide
acatatatactggatc

SEQ ID NO: 2422 - DNA, 16 bp, Artificial sequence
  Synthetic oligonucleotide
tcccatccggagtgct

SEQ ID NO: 2423 - DNA, 16 bp, Artificial sequence
  Synthetic oligonucleotide
cggcagagataaccac

SEQ ID NO: 2424 - DNA, 16 bp, Artificial sequence
  Synthetic oligonucleotide
ccacacgaggcagata

SEQ ID NO: 2425 - DNA, 16 bp, Artificial sequence
  Synthetic oligonucleotide
gccgaatgactatatt

SEQ ID NO: 2426 - DNA, 16 bp, Artificial sequence
  Synthetic oligonucleotide
ctcaactacgccaagc

SEQ ID NO: 2427 - DNA, 16 bp, Artificial sequence
  Synthetic oligonucleotide
ctgaaaatataccgat

SEQ ID NO: 2428 - DNA, 16 bp, Artificial sequence
  Synthetic oligonucleotide
aaggaaattgtctggt

SEQ ID NO: 2429 - DNA, 16 bp, Artificial sequence
  Synthetic oligonucleotide
ccagaatgagcttaca

SEQ ID NO: 2430 - DNA, 16 bp, Artificial sequence
  Synthetic oligonucleotide
ccacaattacatcctg

SEQ ID NO: 2431 - DNA, 16 bp, Artificial sequence
  Synthetic oligonucleotide
gggaataattcgctta

SEQ ID NO: 2432 - DNA, 16 bp, Artificial sequence
  Synthetic oligonucleotide
tcctaaacaatgtggc

SEQ ID NO: 2433 - DNA, 16 bp, Artificial sequence
  Synthetic oligonucleotide
aactaaagctctggcc

SEQ ID NO: 2434 - DNA, 16 bp, Artificial sequence
  Synthetic oligonucleotide
acagatagcaaactat

SEQ ID NO: 2435 - DNA, 16 bp, Artificial sequence
  Synthetic oligonucleotide
taacaaccagcgcagt

SEQ ID NO: 2436 - DNA, 16 bp, Artificial sequence
  Synthetic oligonucleotide
acttactaagagtcag

SEQ ID NO: 2437 - DNA, 16 bp, Artificial sequence
  Synthetic oligonucleotide
aaatatggtgttaatc

SEQ ID NO: 2438 - DNA, 16 bp, Artificial sequence
  Synthetic oligonucleotide
actataagggcaacaa

SEQ ID NO: 2439 - DNA, 16 bp, Artificial sequence
  Synthetic oligonucleotide
agatagtaagtctatc

SEQ ID NO: 2440 - DNA, 16 bp, Artificial sequence
  Synthetic oligonucleotide
gctaatgggttgtgag

SEQ ID NO: 2441 - DNA, 16 bp, Artificial sequence
  Synthetic oligonucleotide
gtgcaaattaggttaa

SEQ ID NO: 2442 - DNA, 16 bp, Artificial sequence
  Synthetic oligonucleotide
aggtaaagatcacggg

SEQ ID NO: 2443 - DNA, 16 bp, Artificial sequence
  Synthetic oligonucleotide
gataactactttgcta

SEQ ID NO: 2444 - DNA, 16 bp, Artificial sequence
  Synthetic oligonucleotide
ttctagacaaggtcac

SEQ ID NO: 2445 - DNA, 16 bp, Artificial sequence
  Synthetic oligonucleotide
aaataacgagcctgta

SEQ ID NO: 2446 - DNA, 16 bp, Artificial sequence
  Synthetic oligonucleotide
aataatacatggtgca

SEQ ID NO: 2447 - DNA, 16 bp, Artificial sequence
  Synthetic oligonucleotide
tatacttaaatcgcaa

SEQ ID NO: 2448 - DNA, 16 bp, Artificial sequence
  Synthetic oligonucleotide
gggattaacaacggag

SEQ ID NO: 2449 - DNA, 16 bp, Artificial sequence
  Synthetic oligonucleotide
tgttaagttgtcactt

SEQ ID NO: 2450 - DNA, 16 bp, Artificial sequence
  Synthetic oligonucleotide
atccataatcatccgt

SEQ ID NO: 2451 - DNA, 16 bp, Artificial sequence
  Synthetic oligonucleotide
tctcatataataggct

SEQ ID NO: 2452 - DNA, 16 bp, Artificial sequence
  Synthetic oligonucleotide
gtacatccttatcatc

SEQ ID NO: 2453 - DNA, 16 bp, Artificial sequence
  Synthetic oligonucleotide
tattacaagattgtct

SEQ ID NO: 2454 - DNA, 16 bp, Artificial sequence
  Synthetic oligonucleotide
acctacaggaagttca

SEQ ID NO: 2455 - DNA, 16 bp, Artificial sequence
  Synthetic oligonucleotide
aagcaagcaatgccta

SEQ ID NO: 2456 - DNA, 16 bp, Artificial sequence
  Synthetic oligonucleotide
ccacactacatggcca

SEQ ID NO: 2457 - DNA, 16 bp, Artificial sequence
  Synthetic oligonucleotide
tttacagtgcccgtta

SEQ ID NO: 2458 - DNA, 16 bp, Artificial sequence
  Synthetic oligonucleotide
gcgagaactgggccgc

SEQ ID NO: 2459 - DNA, 16 bp, Artificial sequence
  Synthetic oligonucleotide
cctagatcggctctga

SEQ ID NO: 2460 - DNA, 16 bp, Artificial sequence
  Synthetic oligonucleotide
atcttcatcgccaaga

SEQ ID NO: 2461 - DNA, 16 bp, Artificial sequence
  Synthetic oligonucleotide
tggattaaggacccca

SEQ ID NO: 2462 - DNA, 16 bp, Artificial sequence
  Synthetic oligonucleotide
ttaacatcaatcgcta

SEQ ID NO: 2463 - DNA, 16 bp, Artificial sequence
  Synthetic oligonucleotide
gagtacggagactccc

SEQ ID NO: 2464 - DNA, 16 bp, Artificial sequence
  Synthetic oligonucleotide
ctatttccaacggcag

SEQ ID NO: 2465 - DNA, 16 bp, Artificial sequence
  Synthetic oligonucleotide
gttaaatggttcgcaa

SEQ ID NO: 2466 - DNA, 16 bp, Artificial sequence
  Synthetic oligonucleotide
aaacgagaaggcaggc

SEQ ID NO: 2467 - DNA, 16 bp, Artificial sequence
  Synthetic oligonucleotide
acttatggaactgcat

SEQ ID NO: 2468 - DNA, 16 bp, Artificial sequence
  Synthetic oligonucleotide
tggtacacgagagttg

SEQ ID NO: 2469 - DNA, 16 bp, Artificial sequence
  Synthetic oligonucleotide
ttgcacttgacggtcc

SEQ ID NO: 2470 - DNA, 16 bp, Artificial sequence
  Synthetic oligonucleotide
cgatgataggagacca

SEQ ID NO: 2471 - DNA, 16 bp, Artificial sequence
  Synthetic oligonucleotide
gttgacaacacattcc

SEQ ID NO: 2472 - DNA, 16 bp, Artificial sequence
  Synthetic oligonucleotide
atgaacatgtggtagg

SEQ ID NO: 2473 - DNA, 16 bp, Artificial sequence
  Synthetic oligonucleotide
gtaactgtattcagca

SEQ ID NO: 2474 - DNA, 16 bp, Artificial sequence
  Synthetic oligonucleotide
ttgcaattgcagtcat

SEQ ID NO: 2475 - DNA, 16 bp, Artificial sequence
  Synthetic oligonucleotide
aaacggatttatcagg

SEQ ID NO: 2476 - DNA, 16 bp, Artificial sequence
  Synthetic oligonucleotide
gtacgatgaaggatat

SEQ ID NO: 2477 - DNA, 16 bp, Artificial sequence
  Synthetic oligonucleotide
aggcgatgaaggtgac

SEQ ID NO: 2478 - DNA, 16 bp, Artificial sequence
  Synthetic oligonucleotide
acttatgttgagtacc

SEQ ID NO: 2479 - DNA, 16 bp, Artificial sequence
  Synthetic oligonucleotide
taatgattcgagttca

SEQ ID NO: 2480 - DNA, 16 bp, Artificial sequence
  Synthetic oligonucleotide
gtcatacggtcttctt

SEQ ID NO: 2481 - DNA, 16 bp, Artificial sequence
  Synthetic oligonucleotide
gcttatctactatatc

SEQ ID NO: 2482 - DNA, 16 bp, Artificial sequence
  Synthetic oligonucleotide
cagaaatgatgtaggc

SEQ ID NO: 2483 - DNA, 16 bp, Artificial sequence
  Synthetic oligonucleotide
agcagaaactactacg

SEQ ID NO: 2484 - DNA, 16 bp, Artificial sequence
  Synthetic oligonucleotide
gaagaaaggtatgctc

SEQ ID NO: 2485 - DNA, 16 bp, Artificial sequence
  Synthetic oligonucleotide
tgtcataagacatgtg

SEQ ID NO: 2486 - DNA, 16 bp, Artificial sequence
  Synthetic oligonucleotide
gaacttaaagccgaaa

SEQ ID NO: 2487 - DNA, 16 bp, Artificial sequence
  Synthetic oligonucleotide
gcttttacattcggaa

SEQ ID NO: 2488 - DNA, 16 bp, Artificial sequence
  Synthetic oligonucleotide
tccagacgcaggatca

SEQ ID NO: 2489 - DNA, 16 bp, Artificial sequence
  Synthetic oligonucleotide
aaacttagatatctac

SEQ ID NO: 2490 - DNA, 16 bp, Artificial sequence
  Synthetic oligonucleotide
ataaatccagtatgcc

SEQ ID NO: 2491 - DNA, 16 bp, Artificial sequence
  Synthetic oligonucleotide
tacgaagcatgccagc

SEQ ID NO: 2492 - DNA, 16 bp, Artificial sequence
  Synthetic oligonucleotide
ttatagaccataaagg

SEQ ID NO: 2493 - DNA, 16 bp, Artificial sequence
  Synthetic oligonucleotide
ggtaaaaggctgagtc

SEQ ID NO: 2494 - DNA, 16 bp, Artificial sequence
  Synthetic oligonucleotide
aaacaagcggttcgca

SEQ ID NO: 2495 - DNA, 16 bp, Artificial sequence
  Synthetic oligonucleotide
atcataaatactcctc

SEQ ID NO: 2496 - DNA, 16 bp, Artificial sequence
  Synthetic oligonucleotide
gaaacgattatgtgca

SEQ ID NO: 2497 - DNA, 16 bp, Artificial sequence
  Synthetic oligonucleotide
actaagggcatgtctc

SEQ ID NO: 2498 - DNA, 16 bp, Artificial sequence
  Synthetic oligonucleotide
gaacatatatactgga

SEQ ID NO: 2499 - DNA, 16 bp, Artificial sequence
  Synthetic oligonucleotide
ccttttcgggctgagt

SEQ ID NO: 2500 - DNA, 16 bp, Artificial sequence
  Synthetic oligonucleotide
actcaatcaaagaggc

SEQ ID NO: 2501 - DNA, 16 bp, Artificial sequence
  Synthetic oligonucleotide
taacgaatatccccac

SEQ ID NO: 2502 - DNA, 16 bp, Artificial sequence
  Synthetic oligonucleotide
cccaaggccgaatgac

SEQ ID NO: 2503 - DNA, 16 bp, Artificial sequence
  Synthetic oligonucleotide
gagaaacccgtggaag

SEQ ID NO: 2504 - DNA, 16 bp, Artificial sequence
  Synthetic oligonucleotide
actgaaaatataccga

SEQ ID NO: 2505 - DNA, 16 bp, Artificial sequence
  Synthetic oligonucleotide
atgcagaaggtctccc

SEQ ID NO: 2506 - DNA, 16 bp, Artificial sequence
  Synthetic oligonucleotide
agcaaaccctgtcatg

SEQ ID NO: 2507 - DNA, 16 bp, Artificial sequence
  Synthetic oligonucleotide
agtaaaccaatgcccg

SEQ ID NO: 2508 - DNA, 16 bp, Artificial sequence
  Synthetic oligonucleotide
ataatagtaagctgtc

SEQ ID NO: 2509 - DNA, 16 bp, Artificial sequence
  Synthetic oligonucleotide
acacagatcgccattt

SEQ ID NO: 2510 - DNA, 16 bp, Artificial sequence
  Synthetic oligonucleotide
caatatccaaccttgg

SEQ ID NO: 2511 - DNA, 16 bp, Artificial sequence
  Synthetic oligonucleotide
ttattagcacattggc

SEQ ID NO: 2512 - DNA, 16 bp, Artificial sequence
  Synthetic oligonucleotide
gtaacaaccagcgcag

SEQ ID NO: 2513 - DNA, 16 bp, Artificial sequence
  Synthetic oligonucleotide
aacgaagaagagtttg

SEQ ID NO: 2514 - DNA, 16 bp, Artificial sequence
  Synthetic oligonucleotide
tatcatagaactatga

SEQ ID NO: 2515 - DNA, 16 bp, Artificial sequence
  Synthetic oligonucleotide
gactataagggcaaca

SEQ ID NO: 2516 - DNA, 16 bp, Artificial sequence
  Synthetic oligonucleotide
taagatagtaagtcta

SEQ ID NO: 2517 - DNA, 16 bp, Artificial sequence
  Synthetic oligonucleotide
ggctaatgggttgtga

SEQ ID NO: 2518 - DNA, 16 bp, Artificial sequence
  Synthetic oligonucleotide
tttaagggtgcaaatt

SEQ ID NO: 2519 - DNA, 16 bp, Artificial sequence
  Synthetic oligonucleotide
ggcttatcagaacttc

SEQ ID NO: 2520 - DNA, 16 bp, Artificial sequence
  Synthetic oligonucleotide
taagatgtaagcatgt

SEQ ID NO: 2521 - DNA, 16 bp, Artificial sequence
  Synthetic oligonucleotide
catgagtattgaaatg

SEQ ID NO: 2522 - DNA, 16 bp, Artificial sequence
  Synthetic oligonucleotide
aaaataacgagcctgt

SEQ ID NO: 2523 - DNA, 16 bp, Artificial sequence
  Synthetic oligonucleotide
ttatagtacaggcttg

SEQ ID NO: 2524 - DNA, 16 bp, Artificial sequence
  Synthetic oligonucleotide
atatacttaaatcgca

SEQ ID NO: 2525 - DNA, 16 bp, Artificial sequence
  Synthetic oligonucleotide
caacatcctagagatc

SEQ ID NO: 2526 - DNA, 16 bp, Artificial sequence
  Synthetic oligonucleotide
atccataaagatcaca

SEQ ID NO: 2527 - DNA, 16 bp, Artificial sequence
  Synthetic oligonucleotide
acccatagcattgact

SEQ ID NO: 2528 - DNA, 16 bp, Artificial sequence
  Synthetic oligonucleotide
agccacacggactctc

SEQ ID NO: 2529 - DNA, 16 bp, Artificial sequence
  Synthetic oligonucleotide
tggcaatgaccgggac

SEQ ID NO: 2530 - DNA, 16 bp, Artificial sequence
  Synthetic oligonucleotide
atcttagtagaatctc

SEQ ID NO: 2531 - DNA, 16 bp, Artificial sequence
  Synthetic oligonucleotide
cacaatagtcttggaa

SEQ ID NO: 2532 - DNA, 16 bp, Artificial sequence
  Synthetic oligonucleotide
taccaggtgaagcaag

SEQ ID NO: 2533 - DNA, 16 bp, Artificial sequence
  Synthetic oligonucleotide
aaggaggtagcacaaa

SEQ ID NO: 2534 - DNA, 16 bp, Artificial sequence
  Synthetic oligonucleotide
atttacagtgcccgtt

SEQ ID NO: 2535 - DNA, 16 bp, Artificial sequence
  Synthetic oligonucleotide
ggcgagaactgggccg

SEQ ID NO: 2536 - DNA, 16 bp, Artificial sequence
  Synthetic oligonucleotide
gtcaaatgaaggtcgg

SEQ ID NO: 2537 - DNA, 16 bp, Artificial sequence
  Synthetic oligonucleotide
cgacattctggcttgt

SEQ ID NO: 2538 - DNA, 16 bp, Artificial sequence
  Synthetic oligonucleotide
aatacgatcttctgga

SEQ ID NO: 2539 - DNA, 16 bp, Artificial sequence
  Synthetic oligonucleotide
cttaacatcaatcgct

SEQ ID NO: 2540 - DNA, 16 bp, Artificial sequence
  Synthetic oligonucleotide
cgagtacggagactcc

SEQ ID NO: 2541 - DNA, 16 bp, Artificial sequence
  Synthetic oligonucleotide
agctatttccaacggc

SEQ ID NO: 2542 - DNA, 16 bp, Artificial sequence
  Synthetic oligonucleotide
aagttaaatggttcgc

SEQ ID NO: 2543 - DNA, 16 bp, Artificial sequence
  Synthetic oligonucleotide
tagaaaaacgagaagg

SEQ ID NO: 2544 - DNA, 16 bp, Artificial sequence
  Synthetic oligonucleotide
gacttatggaactgca

SEQ ID NO: 2545 - DNA, 16 bp, Artificial sequence
  Synthetic oligonucleotide
ctggtacacgagagtt

SEQ ID NO: 2546 - DNA, 16 bp, Artificial sequence
  Synthetic oligonucleotide
agcgatcttgcacttg

SEQ ID NO: 2547 - DNA, 16 bp, Artificial sequence
  Synthetic oligonucleotide
agcgatgataggagac

SEQ ID NO: 2548 - DNA, 16 bp, Artificial sequence
  Synthetic oligonucleotide
agagaaaccctaaggg

SEQ ID NO: 2549 - DNA, 16 bp, Artificial sequence
  Synthetic oligonucleotide
cactacccatagtgat

SEQ ID NO: 2550 - DNA, 16 bp, Artificial sequence
  Synthetic oligonucleotide
ccaagtaactgtattc

SEQ ID NO: 2551 - DNA, 16 bp, Artificial sequence
  Synthetic oligonucleotide
atgacgggaaaggcag

SEQ ID NO: 2552 - DNA, 16 bp, Artificial sequence
  Synthetic oligonucleotide
tcaaacggatttatca

SEQ ID NO: 2553 - DNA, 16 bp, Artificial sequence
  Synthetic oligonucleotide
tgtacgatgaaggata

SEQ ID NO: 2554 - DNA, 16 bp, Artificial sequence
  Synthetic oligonucleotide
acaaaggcgatgaagg

SEQ ID NO: 2555 - DNA, 16 bp, Artificial sequence
  Synthetic oligonucleotide
aacttatgttgagtac

SEQ ID NO: 2556 - DNA, 16 bp, Artificial sequence
  Synthetic oligonucleotide
ataatgattcgagttc

SEQ ID NO: 2557 - DNA, 16 bp, Artificial sequence
  Synthetic oligonucleotide
aggtcatacggtcttc

SEQ ID NO: 2558 - DNA, 16 bp, Artificial sequence
  Synthetic oligonucleotide
tgcttatctactatat

SEQ ID NO: 2559 - DNA, 16 bp, Artificial sequence
  Synthetic oligonucleotide
tacgagacctcacata

SEQ ID NO: 2560 - DNA, 16 bp, Artificial sequence
  Synthetic oligonucleotide
ataggtatggaaatca

SEQ ID NO: 2561 - DNA, 16 bp, Artificial sequence
  Synthetic oligonucleotide
gattatgtgtccagat

SEQ ID NO: 2562 - DNA, 16 bp, Artificial sequence
  Synthetic oligonucleotide
agcgaggcacatctca

SEQ ID NO: 2563 - DNA, 16 bp, Artificial sequence
  Synthetic oligonucleotide
agaacttaaagccgaa

SEQ ID NO: 2564 - DNA, 16 bp, Artificial sequence
  Synthetic oligonucleotide
agtcatgcgcttttac

SEQ ID NO: 2565 - DNA, 16 bp, Artificial sequence
  Synthetic oligonucleotide
tccaaagtccagacgc

SEQ ID NO: 2566 - DNA, 16 bp, Artificial sequence
  Synthetic oligonucleotide
gataagcagtaaactt

SEQ ID NO: 2567 - DNA, 16 bp, Artificial sequence
  Synthetic oligonucleotide
gtatatatccaccttt

SEQ ID NO: 2568 - DNA, 16 bp, Artificial sequence
  Synthetic oligonucleotide
ctacgaagcatgccag

SEQ ID NO: 2569 - DNA, 16 bp, Artificial sequence
  Synthetic oligonucleotide
tcttatagaccataaa

SEQ ID NO: 2570 - DNA, 16 bp, Artificial sequence
  Synthetic oligonucleotide
ccgaagggagtagatg

SEQ ID NO: 2571 - DNA, 16 bp, Artificial sequence
  Synthetic oligonucleotide
aaacaaaacaagcggt

SEQ ID NO: 2572 - DNA, 16 bp, Artificial sequence
  Synthetic oligonucleotide
tcctaaaagggtgttt

SEQ ID NO: 2573 - DNA, 16 bp, Artificial sequence
  Synthetic oligonucleotide
cagaaacgattatgtg

SEQ ID NO: 2574 - DNA, 16 bp, Artificial sequence
  Synthetic oligonucleotide
gtcgatatttttttca

SEQ ID NO: 2575 - DNA, 16 bp, Artificial sequence
  Synthetic oligonucleotide
ctgaactggatctaaa

SEQ ID NO: 2576 - DNA, 16 bp, Artificial sequence
  Synthetic oligonucleotide
gtttaagcacaactta

SEQ ID NO: 2577 - DNA, 16 bp, Artificial sequence
  Synthetic oligonucleotide
gttaaactcaatcaaa

SEQ ID NO: 2578 - DNA, 16 bp, Artificial sequence
  Synthetic oligonucleotide
tcataacgaatatccc

SEQ ID NO: 2579 - DNA, 16 bp, Artificial sequence
  Synthetic oligonucleotide
aaacgaggaagcagcg

SEQ ID NO: 2580 - DNA, 16 bp, Artificial sequence
  Synthetic oligonucleotide
ttatagaggcttctgg

SEQ ID NO: 2581 - DNA, 16 bp, Artificial sequence
  Synthetic oligonucleotide
acccatagggtcttgg

SEQ ID NO: 2582 - DNA, 16 bp, Artificial sequence
  Synthetic oligonucleotide
agccacgaagatttta

SEQ ID NO: 2583 - DNA, 16 bp, Artificial sequence
  Synthetic oligonucleotide
tatagaggaatgactc

SEQ ID NO: 2584 - DNA, 16 bp, Artificial sequence
  Synthetic oligonucleotide
cagtaaaccaatgccc

SEQ ID NO: 2585 - DNA, 16 bp, Artificial sequence
  Synthetic oligonucleotide
gataatagtaagctgt

SEQ ID NO: 2586 - DNA, 16 bp, Artificial sequence
  Synthetic oligonucleotide
ccatatcaagtcccac

SEQ ID NO: 2587 - DNA, 16 bp, Artificial sequence
  Synthetic oligonucleotide
gctaaactatagatta

SEQ ID NO: 2588 - DNA, 16 bp, Artificial sequence
  Synthetic oligonucleotide
caccaagcagtatgaa

SEQ ID NO: 2589 - DNA, 16 bp, Artificial sequence
  Synthetic oligonucleotide
atagacaggtaacaac

SEQ ID NO: 2590 - DNA, 16 bp, Artificial sequence
  Synthetic oligonucleotide
caacgaagaagagttt

SEQ ID NO: 2591 - DNA, 16 bp, Artificial sequence
  Synthetic oligonucleotide
caagataccacctacc

SEQ ID NO: 2592 - DNA, 16 bp, Artificial sequence
  Synthetic oligonucleotide
acacatgggacagctt

SEQ ID NO: 2593 - DNA, 16 bp, Artificial sequence
  Synthetic oligonucleotide
gcattaagatagtaag

SEQ ID NO: 2594 - DNA, 16 bp, Artificial sequence
  Synthetic oligonucleotide
gaaaatgacggctaat

SEQ ID NO: 2595 - DNA, 16 bp, Artificial sequence
  Synthetic oligonucleotide
agtaactgagtaagat

SEQ ID NO: 2596 - DNA, 16 bp, Artificial sequence
  Synthetic oligonucleotide
gttaaagagggcctga

SEQ ID NO: 2597 - DNA, 16 bp, Artificial sequence
  Synthetic oligonucleotide
gtaagatgtaagcatg

SEQ ID NO: 2598 - DNA, 16 bp, Artificial sequence
  Synthetic oligonucleotide
cagcaaccatccagga

SEQ ID NO: 2599 - DNA, 16 bp, Artificial sequence
  Synthetic oligonucleotide
taaaataacgagcctg

SEQ ID NO: 2600 - DNA, 16 bp, Artificial sequence
  Synthetic oligonucleotide
tcttatagtacaggct

SEQ ID NO: 2601 - DNA, 16 bp, Artificial sequence
  Synthetic oligonucleotide
caagagtggattagta

SEQ ID NO: 2602 - DNA, 16 bp, Artificial sequence
  Synthetic oligonucleotide
tggaaagatcctgcag

SEQ ID NO: 2603 - DNA, 16 bp, Artificial sequence
  Synthetic oligonucleotide
acctaatgcaatcaag

SEQ ID NO: 2604 - DNA, 16 bp, Artificial sequence
  Synthetic oligonucleotide
gagcagagtgatccaa

SEQ ID NO: 2605 - DNA, 16 bp, Artificial sequence
  Synthetic oligonucleotide
cccaagagcatagacg

SEQ ID NO: 2606 - DNA, 16 bp, Artificial sequence
  Synthetic oligonucleotide
tagtaagtggactgtg

SEQ ID NO: 2607 - DNA, 16 bp, Artificial sequence
  Synthetic oligonucleotide
agcttaatgtgtatga

SEQ ID NO: 2608 - DNA, 16 bp, Artificial sequence
  Synthetic oligonucleotide
acacaatagtcttgga

SEQ ID NO: 2609 - DNA, 16 bp, Artificial sequence
  Synthetic oligonucleotide
ccacataccaggtgaa

SEQ ID NO: 2610 - DNA, 16 bp, Artificial sequence
  Synthetic oligonucleotide
tgacaattgctgggta

SEQ ID NO: 2611 - DNA, 16 bp, Artificial sequence
  Synthetic oligonucleotide
tccccacagggcagtc

SEQ ID NO: 2612 - DNA, 16 bp, Artificial sequence
  Synthetic oligonucleotide
ctaagtcccaagttct

SEQ ID NO: 2613 - DNA, 16 bp, Artificial sequence
  Synthetic oligonucleotide
gataccacctaccaga

SEQ ID NO: 2614 - DNA, 16 bp, Artificial sequence
  Synthetic oligonucleotide
ctttggtagatgcagc

SEQ ID NO: 2615 - DNA, 16 bp, Artificial sequence
  Synthetic oligonucleotide
agtctaaagacatggc

SEQ ID NO: 2616 - DNA, 16 bp, Artificial sequence
  Synthetic oligonucleotide
ccaatttcaagtccta

SEQ ID NO: 2617 - DNA, 16 bp, Artificial sequence
  Synthetic oligonucleotide
taaagctgtatttccg

SEQ ID NO: 2618 - DNA, 16 bp, Artificial sequence
  Synthetic oligonucleotide
atcataacgaatatcc

SEQ ID NO: 2619 - DNA, 16 bp, Artificial sequence
  Synthetic oligonucleotide
tattgatagtcatgag

SEQ ID NO: 2620 - DNA, 16 bp, Artificial sequence
  Synthetic oligonucleotide
ccctatttgtttcctg

SEQ ID NO: 2621 - DNA, 16 bp, Artificial sequence
  Synthetic oligonucleotide
acagagctagtttgtc

SEQ ID NO: 2622 - DNA, 16 bp, Artificial sequence
  Synthetic oligonucleotide
agatagcaaactatct

SEQ ID NO: 2623 - DNA, 16 bp, Artificial sequence
  Synthetic oligonucleotide
actatatgtgttcaag

SEQ ID NO: 2624 - DNA, 16 bp, Artificial sequence
  Synthetic oligonucleotide
ggacaatgtatacact

SEQ ID NO: 2625 - DNA, 16 bp, Artificial sequence
  Synthetic oligonucleotide
gaattttagtcccaac

SEQ ID NO: 2626 - DNA, 16 bp, Artificial sequence
  Synthetic oligonucleotide
taggtatggaaatcaa

SEQ ID NO: 2627 - DNA, 16 bp, Artificial sequence
  Synthetic oligonucleotide
gtgaaatggtaccatg

SEQ ID NO: 2628 - DNA, 16 bp, Artificial sequence
  Synthetic oligonucleotide
tattatcttgagggca

SEQ ID NO: 2629 - DNA, 16 bp, Artificial sequence
  Synthetic oligonucleotide
ttgacttagaactgtc

SEQ ID NO: 2630 - DNA, 16 bp, Artificial sequence
  Synthetic oligonucleotide
ttattaatcccccccc

SEQ ID NO: 2631 - DNA, 16 bp, Artificial sequence
  Synthetic oligonucleotide
acacttatcatcatgc

SEQ ID NO: 2632 - DNA, 16 bp, Artificial sequence
  Synthetic oligonucleotide
gttataaaccatttat

SEQ ID NO: 2633 - DNA, 16 bp, Artificial sequence
  Synthetic oligonucleotide
tatgagcatatctaac

SEQ ID NO: 2634 - DNA, 16 bp, Artificial sequence
  Synthetic oligonucleotide
agccttgaggcacggg

SEQ ID NO: 2635 - DNA, 16 bp, Artificial sequence
  Synthetic oligonucleotide
gatagcatggtctggg

SEQ ID NO: 2636 - DNA, 16 bp, Artificial sequence
  Synthetic oligonucleotide
cagcggatgcccaggg

SEQ ID NO: 2637 - DNA, 16 bp, Artificial sequence
  Synthetic oligonucleotide
gtcgctgcagtagggt

SEQ ID NO: 2638 - DNA, 16 bp, Artificial sequence
  Synthetic oligonucleotide
aggcgagaactgggcc

SEQ ID NO: 2639 - DNA, 16 bp, Artificial sequence
  Synthetic oligonucleotide
gtccgagaatttcagc

SEQ ID NO: 2640 - DNA, 16 bp, Artificial sequence
  Synthetic oligonucleotide
tgcccggaccctgcgc

SEQ ID NO: 2641 - DNA, 16 bp, Artificial sequence
  Synthetic oligonucleotide
cccggcgacctccctg

SEQ ID NO: 2642 - DNA, 16 bp, Artificial sequence
  Synthetic oligonucleotide
ggcagattgccagaaa

SEQ ID NO: 2643 - DNA, 16 bp, Artificial sequence
  Synthetic oligonucleotide
aatggagatactgtga

SEQ ID NO: 2644 - DNA, 16 bp, Artificial sequence
  Synthetic oligonucleotide
cccacgatccattgct

SEQ ID NO: 2645 - DNA, 16 bp, Artificial sequence
  Synthetic oligonucleotide
cagctcccaggtcgat

SEQ ID NO: 2646 - DNA, 16 bp, Artificial sequence
  Synthetic oligonucleotide
accccaaggcttagct

SEQ ID NO: 2647 - DNA, 16 bp, Artificial sequence
  Synthetic oligonucleotide
tctaggtccttccagc

SEQ ID NO: 2648 - DNA, 16 bp, Artificial sequence
  Synthetic oligonucleotide
gtgctacggtcacatt

SEQ ID NO: 2649 - DNA, 16 bp, Artificial sequence
  Synthetic oligonucleotide
gggttttaacacgcct

SEQ ID NO: 2650 - DNA, 16 bp, Artificial sequence
  Synthetic oligonucleotide
ggattcgccacttaag

SEQ ID NO: 2651 - DNA, 16 bp, Artificial sequence
  Synthetic oligonucleotide
gatgttagactgcctc

SEQ ID NO: 2652 - DNA, 16 bp, Artificial sequence
  Synthetic oligonucleotide
agatttcccatccgct

SEQ ID NO: 2653 - DNA, 16 bp, Artificial sequence
  Synthetic oligonucleotide
ctcttgtaaataggtg

SEQ ID NO: 2654 - DNA, 16 bp, Artificial sequence
  Synthetic oligonucleotide
actctagatgtttggc

SEQ ID NO: 2655 - DNA, 16 bp, Artificial sequence
  Synthetic oligonucleotide
tggagagactcccgaa

SEQ ID NO: 2656 - DNA, 16 bp, Artificial sequence
  Synthetic oligonucleotide
cccgtggaagacagca

SEQ ID NO: 2657 - DNA, 16 bp, Artificial sequence
  Synthetic oligonucleotide
ggacttgatatttgga

SEQ ID NO: 2658 - DNA, 16 bp, Artificial sequence
  Synthetic oligonucleotide
aacccaaagcattgat

SEQ ID NO: 2659 - DNA, 16 bp, Artificial sequence
  Synthetic oligonucleotide
actccgggtccctgcc

SEQ ID NO: 2660 - DNA, 16 bp, Artificial sequence
  Synthetic oligonucleotide
caccagcgatcctgct

SEQ ID NO: 2661 - DNA, 16 bp, Artificial sequence
  Synthetic oligonucleotide
acttagctctgaaccc

SEQ ID NO: 2662 - DNA, 16 bp, Artificial sequence
  Synthetic oligonucleotide
ggaaaccagggtacct

SEQ ID NO: 2663 - DNA, 16 bp, Artificial sequence
  Synthetic oligonucleotide
cagggaataattcgct

SEQ ID NO: 2664 - DNA, 16 bp, Artificial sequence
  Synthetic oligonucleotide
ccctccttggtaattc

SEQ ID NO: 2665 - DNA, 16 bp, Artificial sequence
  Synthetic oligonucleotide
caggctaactttgcct

SEQ ID NO: 2666 - DNA, 16 bp, Artificial sequence
  Synthetic oligonucleotide
agccccctcagctata

SEQ ID NO: 2667 - DNA, 16 bp, Artificial sequence
  Synthetic oligonucleotide
attcgacatgcaagct

SEQ ID NO: 2668 - DNA, 16 bp, Artificial sequence
  Synthetic oligonucleotide
tctgaccgcccaccta

SEQ ID NO: 2669 - DNA, 16 bp, Artificial sequence
  Synthetic oligonucleotide
cactctattgacttac

SEQ ID NO: 2670 - DNA, 16 bp, Artificial sequence
  Synthetic oligonucleotide
cattgtagctatattc

SEQ ID NO: 2671 - DNA, 16 bp, Artificial sequence
  Synthetic oligonucleotide
acaacctgagttccac

SEQ ID NO: 2672 - DNA, 16 bp, Artificial sequence
  Synthetic oligonucleotide
actaggagttaaagtc

SEQ ID NO: 2673 - DNA, 16 bp, Artificial sequence
  Synthetic oligonucleotide
gatagcctcagtattc

SEQ ID NO: 2674 - DNA, 16 bp, Artificial sequence
  Synthetic oligonucleotide
gtacctagacatactc

SEQ ID NO: 2675 - DNA, 16 bp, Artificial sequence
  Synthetic oligonucleotide
caatcatcgcttatga

SEQ ID NO: 2676 - DNA, 16 bp, Artificial sequence
  Synthetic oligonucleotide
gcaatacctaggagaa

SEQ ID NO: 2677 - DNA, 16 bp, Artificial sequence
  Synthetic oligonucleotide
gacttagaactgtcac

SEQ ID NO: 2678 - DNA, 16 bp, Artificial sequence
  Synthetic oligonucleotide
caagagccctagcacc

SEQ ID NO: 2679 - DNA, 16 bp, Artificial sequence
  Synthetic oligonucleotide
agacgcaggatcagga

SEQ ID NO: 2680 - DNA, 16 bp, Artificial sequence
  Synthetic oligonucleotide
gaaagccacccatagc

SEQ ID NO: 2681 - DNA, 16 bp, Artificial sequence
  Synthetic oligonucleotide
atgctacccaaatgca

SEQ ID NO: 2682 - DNA, 16 bp, Artificial sequence
  Synthetic oligonucleotide
accttaaggactgtgt

SEQ ID NO: 2683 - DNA, 16 bp, Artificial sequence
  Synthetic oligonucleotide
actgaccctgtccaga

SEQ ID NO: 2684 - DNA, 16 bp, Artificial sequence
  Synthetic oligonucleotide
acaagattgtctgcat

SEQ ID NO: 2685 - DNA, 16 bp, Artificial sequence
  Synthetic oligonucleotide
ttatcatcatgcaggc

SEQ ID NO: 2686 - DNA, 16 bp, Artificial sequence
  Synthetic oligonucleotide
ccacttgactggcccc

SEQ ID NO: 2687 - DNA, 16 bp, Artificial sequence
  Synthetic oligonucleotide
cagcccttcggtgttg

SEQ ID NO: 2688 - DNA, 16 bp, Artificial sequence
  Synthetic oligonucleotide
ctctacaagtgagtgg

SEQ ID NO: 2689 - DNA, 16 bp, Artificial sequence
  Synthetic oligonucleotide
tctaagtcccaagttc

SEQ ID NO: 2690 - DNA, 16 bp, Artificial sequence
  Synthetic oligonucleotide
tcaagataccacctac

SEQ ID NO: 2691 - DNA, 16 bp, Artificial sequence
  Synthetic oligonucleotide
gcaacataataagggc

SEQ ID NO: 2692 - DNA, 16 bp, Artificial sequence
  Synthetic oligonucleotide
gctttactaacaatgt

SEQ ID NO: 2693 - DNA, 16 bp, Artificial sequence
  Synthetic oligonucleotide
atctatgagtagctcc

SEQ ID NO: 2694 - DNA, 16 bp, Artificial sequence
  Synthetic oligonucleotide
gatacaatatcataac

SEQ ID NO: 2695 - DNA, 16 bp, Artificial sequence
  Synthetic oligonucleotide
ctattgatagtcatga

SEQ ID NO: 2696 - DNA, 16 bp, Artificial sequence
  Synthetic oligonucleotide
caccctatttgtttcc

SEQ ID NO: 2697 - DNA, 16 bp, Artificial sequence
  Synthetic oligonucleotide
tattcaatgaactgca

SEQ ID NO: 2698 - DNA, 16 bp, Artificial sequence
  Synthetic oligonucleotide
gcaaatatctgcacag

SEQ ID NO: 2699 - DNA, 16 bp, Artificial sequence
  Synthetic oligonucleotide
aatgacactatatgtg

SEQ ID NO: 2700 - DNA, 16 bp, Artificial sequence
  Synthetic oligonucleotide
gtaaccaaagcagttc

SEQ ID NO: 2701 - DNA, 16 bp, Artificial sequence
  Synthetic oligonucleotide
cagcagaaactactac

SEQ ID NO: 2702 - DNA, 16 bp, Artificial sequence
  Synthetic oligonucleotide
gaggtaaagatcacgg

SEQ ID NO: 2703 - DNA, 16 bp, Artificial sequence
  Synthetic oligonucleotide
acatctaaccttgggc

SEQ ID NO: 2704 - DNA, 16 bp, Artificial sequence
  Synthetic oligonucleotide
ccatattatcttgagg

SEQ ID NO: 2705 - DNA, 16 bp, Artificial sequence
  Synthetic oligonucleotide
attgacttagaactgt

SEQ ID NO: 2706 - DNA, 16 bp, Artificial sequence
  Synthetic oligonucleotide
tttattaatccccccc

SEQ ID NO: 2707 - DNA, 16 bp, Artificial sequence
  Synthetic oligonucleotide
gttaacagagtgctag

SEQ ID NO: 2708 - DNA, 16 bp, Artificial sequence
  Synthetic oligonucleotide
cacccggccaaacagc

SEQ ID NO: 2709 - DNA, 16 bp, Artificial sequence
  Synthetic oligonucleotide
catactcaggactgtt

SEQ ID NO: 2710 - DNA, 16 bp, Artificial sequence
  Synthetic oligonucleotide
gtgcgcaggccagcct

SEQ ID NO: 2711 - DNA, 16 bp, Artificial sequence
  Synthetic oligonucleotide
actggatagcatggtc

SEQ ID NO: 2712 - DNA, 16 bp, Artificial sequence
  Synthetic oligonucleotide
aatgtagctcagcgga

SEQ ID NO: 2713 - DNA, 16 bp, Artificial sequence
  Synthetic oligonucleotide
acttacagcccaaagg

SEQ ID NO: 2714 - DNA, 16 bp, Artificial sequence
  Synthetic oligonucleotide
caaggcgagaactggg

SEQ ID NO: 2715 - DNA, 16 bp, Artificial sequence
  Synthetic oligonucleotide
gagtccgagaatttca

SEQ ID NO: 2716 - DNA, 16 bp, Artificial sequence
  Synthetic oligonucleotide
cgagagggttgcccgg

SEQ ID NO: 2717 - DNA, 16 bp, Artificial sequence
  Synthetic oligonucleotide
aagcacctcccggcga

SEQ ID NO: 2718 - DNA, 16 bp, Artificial sequence
  Synthetic oligonucleotide
gctcgcttggttccta

SEQ ID NO: 2719 - DNA, 16 bp, Artificial sequence
  Synthetic oligonucleotide
caggcacaatggagat

SEQ ID NO: 2720 - DNA, 16 bp, Artificial sequence
  Synthetic oligonucleotide
caccgtttggtgatga

SEQ ID NO: 2721 - DNA, 16 bp, Artificial sequence
  Synthetic oligonucleotide
acagctcccaggtcga

SEQ ID NO: 2722 - DNA, 16 bp, Artificial sequence
  Synthetic oligonucleotide
gaccccaaggcttagc

SEQ ID NO: 2723 - DNA, 16 bp, Artificial sequence
  Synthetic oligonucleotide
gtatctctaggtcctt

SEQ ID NO: 2724 - DNA, 16 bp, Artificial sequence
  Synthetic oligonucleotide
ggacaagcagtgctac

SEQ ID NO: 2725 - DNA, 16 bp, Artificial sequence
  Synthetic oligonucleotide
gccgggttttaacacg

SEQ ID NO: 2726 - DNA, 16 bp, Artificial sequence
  Synthetic oligonucleotide
ggaggattcgccactt

SEQ ID NO: 2727 - DNA, 16 bp, Artificial sequence
  Synthetic oligonucleotide
caacctagatgttaga

SEQ ID NO: 2728 - DNA, 16 bp, Artificial sequence
  Synthetic oligonucleotide
agagatttcccatccg

SEQ ID NO: 2729 - DNA, 16 bp, Artificial sequence
  Synthetic oligonucleotide
aggccgaatgactata

SEQ ID NO: 2730 - DNA, 16 bp, Artificial sequence
  Synthetic oligonucleotide
ccgtgacaatgctgag

SEQ ID NO: 2731 - DNA, 16 bp, Artificial sequence
  Synthetic oligonucleotide
aatggagagactcccg

SEQ ID NO: 2732 - DNA, 16 bp, Artificial sequence
  Synthetic oligonucleotide
gaaacccgtggaagac

SEQ ID NO: 2733 - DNA, 16 bp, Artificial sequence
  Synthetic oligonucleotide
aacttggacttgatat

SEQ ID NO: 2734 - DNA, 16 bp, Artificial sequence
  Synthetic oligonucleotide
tgagactggcaagatt

SEQ ID NO: 2735 - DNA, 16 bp, Artificial sequence
  Synthetic oligonucleotide
gccagatgactccggg

SEQ ID NO: 2736 - DNA, 16 bp, Artificial sequence
  Synthetic oligonucleotide
tgtgaggcaccagcga

SEQ ID NO: 2737 - DNA, 16 bp, Artificial sequence
  Synthetic oligonucleotide
ctggcatgcccaagac

SEQ ID NO: 2738 - DNA, 16 bp, Artificial sequence
  Synthetic oligonucleotide
cctacctcaatgcctg

SEQ ID NO: 2739 - DNA, 16 bp, Artificial sequence
  Synthetic oligonucleotide
aacagggaataattcg

SEQ ID NO: 2740 - DNA, 16 bp, Artificial sequence
  Synthetic oligonucleotide
ggatatcaatctccct

SEQ ID NO: 2741 - DNA, 16 bp, Artificial sequence
  Synthetic oligonucleotide
ccccctgggcttcaac

SEQ ID NO: 2742 - DNA, 16 bp, Artificial sequence
  Synthetic oligonucleotide
atacatcagccccctc

SEQ ID NO: 2743 - DNA, 16 bp, Artificial sequence
  Synthetic oligonucleotide
ggattcgacatgcaag

SEQ ID NO: 2744 - DNA, 16 bp, Artificial sequence
  Synthetic oligonucleotide
ggttaggacagcccag

SEQ ID NO: 2745 - DNA, 16 bp, Artificial sequence
  Synthetic oligonucleotide
aggaactactgttgca

SEQ ID NO: 2746 - DNA, 16 bp, Artificial sequence
  Synthetic oligonucleotide
gacattgtagctatat

SEQ ID NO: 2747 - DNA, 16 bp, Artificial sequence
  Synthetic oligonucleotide
gcactttggtagatgc

SEQ ID NO: 2748 - DNA, 16 bp, Artificial sequence
  Synthetic oligonucleotide
aaacaacctgagttcc

SEQ ID NO: 2749 - DNA, 16 bp, Artificial sequence
  Synthetic oligonucleotide
tcactaggagttaaag

SEQ ID NO: 2750 - DNA, 16 bp, Artificial sequence
  Synthetic oligonucleotide
gctctacagatagcct

SEQ ID NO: 2751 - DNA, 16 bp, Artificial sequence
  Synthetic oligonucleotide
cagtacctagacatac

SEQ ID NO: 2752 - DNA, 16 bp, Artificial sequence
  Synthetic oligonucleotide
cccaatcatcgcttat

SEQ ID NO: 2753 - DNA, 16 bp, Artificial sequence
  Synthetic oligonucleotide
atcgcaatacctagga

SEQ ID NO: 2754 - DNA, 16 bp, Artificial sequence
  Synthetic oligonucleotide
ctaacttcttactagt

SEQ ID NO: 2755 - DNA, 16 bp, Artificial sequence
  Synthetic oligonucleotide
aacctacagtcagctc

SEQ ID NO: 2756 - DNA, 16 bp, Artificial sequence
  Synthetic oligonucleotide
ctataggttctgaaaa

SEQ ID NO: 2757 - DNA, 16 bp, Artificial sequence
  Synthetic oligonucleotide
aatgaccattgctgcc

SEQ ID NO: 2758 - DNA, 16 bp, Artificial sequence
  Synthetic oligonucleotide
cggaggatgctaccca

SEQ ID NO: 2759 - DNA, 16 bp, Artificial sequence
  Synthetic oligonucleotide
ctaccttaaggactgt

SEQ ID NO: 2760 - DNA, 16 bp, Artificial sequence
  Synthetic oligonucleotide
ggagcataggtcatct

SEQ ID NO: 2761 - DNA, 16 bp, Artificial sequence
  Synthetic oligonucleotide
tgattgttgtcatgag

SEQ ID NO: 2762 - DNA, 16 bp, Artificial sequence
  Synthetic oligonucleotide
cacttatcatcatgca

SEQ ID NO: 2763 - DNA, 16 bp, Artificial sequence
  Synthetic oligonucleotide
ctgttaagcctgtcct

SEQ ID NO: 2764 - DNA, 16 bp, Artificial sequence
  Synthetic oligonucleotide
gcactggatatgcagg

SEQ ID NO: 2765 - DNA, 16 bp, Artificial sequence
  Synthetic oligonucleotide
tatatgccactctaca

SEQ ID NO: 2766 - DNA, 16 bp, Artificial sequence
  Synthetic oligonucleotide
gttctaagtcccaagt

SEQ ID NO: 2767 - DNA, 16 bp, Artificial sequence
  Synthetic oligonucleotide
atgagtcaagatacca

SEQ ID NO: 2768 - DNA, 16 bp, Artificial sequence
  Synthetic oligonucleotide
aaggtttatggtggtg

SEQ ID NO: 2769 - DNA, 16 bp, Artificial sequence
  Synthetic oligonucleotide
atgttaaactaagtca

SEQ ID NO: 2770 - DNA, 16 bp, Artificial sequence
  Synthetic oligonucleotide
gatctatgagtagctc

SEQ ID NO: 2771 - DNA, 16 bp, Artificial sequence
  Synthetic oligonucleotide
atcaaggcaaggccca

SEQ ID NO: 2772 - DNA, 16 bp, Artificial sequence
  Synthetic oligonucleotide
aacctattgatagtca

SEQ ID NO: 2773 - DNA, 16 bp, Artificial sequence
  Synthetic oligonucleotide
tataactggtccttcc

SEQ ID NO: 2774 - DNA, 16 bp, Artificial sequence
  Synthetic oligonucleotide
ttattcaatgaactgc

SEQ ID NO: 2775 - DNA, 16 bp, Artificial sequence
  Synthetic oligonucleotide
gttattagcacattgg

SEQ ID NO: 2776 - DNA, 16 bp, Artificial sequence
  Synthetic oligonucleotide
aattgtaacacctcta

SEQ ID NO: 2777 - DNA, 16 bp, Artificial sequence
  Synthetic oligonucleotide
ctgactataagggcaa

SEQ ID NO: 2778 - DNA, 16 bp, Artificial sequence
  Synthetic oligonucleotide
agatactgtcttcacc

SEQ ID NO: 2779 - DNA, 16 bp, Artificial sequence
  Synthetic oligonucleotide
agaggtaaagatcacg

SEQ ID NO: 2780 - DNA, 16 bp, Artificial sequence
  Synthetic oligonucleotide
ggttaatcatttactt

SEQ ID NO: 2781 - DNA, 16 bp, Artificial sequence
  Synthetic oligonucleotide
atccatattatcttga

SEQ ID NO: 2782 - DNA, 16 bp, Artificial sequence
  Synthetic oligonucleotide
ctaattactaacttct

SEQ ID NO: 2783 - DNA, 16 bp, Artificial sequence
  Synthetic oligonucleotide
ttttattaatcccccc

SEQ ID NO: 2784 - DNA, 16 bp, Artificial sequence
  Synthetic oligonucleotide
gaaacatgaccttggc

SEQ ID NO: 2785 - DNA, 16 bp, Artificial sequence
  Synthetic oligonucleotide
aaaactcacccggcca

SEQ ID NO: 2786 - DNA, 16 bp, Artificial sequence
  Synthetic oligonucleotide
cttatgtgatcacaac

SEQ ID NO: 2787 - DNA, 16 bp, Artificial sequence
  Synthetic oligonucleotide
ccgtgcgcaggccagc

SEQ ID NO: 2788 - DNA, 16 bp, Artificial sequence
  Synthetic oligonucleotide
ctactggatagcatgg

SEQ ID NO: 2789 - DNA, 16 bp, Artificial sequence
  Synthetic oligonucleotide
cagccaaatgtagctc

SEQ ID NO: 2790 - DNA, 16 bp, Artificial sequence
  Synthetic oligonucleotide
gcaccctcactggaag

SEQ ID NO: 2791 - DNA, 16 bp, Artificial sequence
  Synthetic oligonucleotide
tcagcaaggcgagaac

SEQ ID NO: 2792 - DNA, 16 bp, Artificial sequence
  Synthetic oligonucleotide
cggacgggagagagag

SEQ ID NO: 2793 - DNA, 16 bp, Artificial sequence
  Synthetic oligonucleotide
gctcgagagggttgcc

SEQ ID NO: 2794 - DNA, 16 bp, Artificial sequence
  Synthetic oligonucleotide
ctgcacgcttccaccc

SEQ ID NO: 2795 - DNA, 16 bp, Artificial sequence
  Synthetic oligonucleotide
gcgctcgcttggttcc

SEQ ID NO: 2796 - DNA, 16 bp, Artificial sequence
  Synthetic oligonucleotide
catcatcaccaggcac

SEQ ID NO: 2797 - DNA, 16 bp, Artificial sequence
  Synthetic oligonucleotide
ctcaccgtttggtgat

SEQ ID NO: 2798 - DNA, 16 bp, Artificial sequence
  Synthetic oligonucleotide
tcacagctcccaggtc

SEQ ID NO: 2799 - DNA, 16 bp, Artificial sequence
  Synthetic oligonucleotide
ggaccccaaggcttag

SEQ ID NO: 2800 - DNA, 16 bp, Artificial sequence
  Synthetic oligonucleotide
atttccgtggcctttt

SEQ ID NO: 2801 - DNA, 16 bp, Artificial sequence
  Synthetic oligonucleotide
aaccggatgctgtggc

SEQ ID NO: 2802 - DNA, 16 bp, Artificial sequence
  Synthetic oligonucleotide
tcgccgggttttaaca

SEQ ID NO: 2803 - DNA, 16 bp, Artificial sequence
  Synthetic oligonucleotide
ctggaggattcgccac

SEQ ID NO: 2804 - DNA, 16 bp, Artificial sequence
  Synthetic oligonucleotide
attaagatgtagcctg

SEQ ID NO: 2805 - DNA, 16 bp, Artificial sequence
  Synthetic oligonucleotide
gatggatcagattcta

SEQ ID NO: 2806 - DNA, 16 bp, Artificial sequence
  Synthetic oligonucleotide
ttcccccaaggccgaa

SEQ ID NO: 2807 - DNA, 16 bp, Artificial sequence
  Synthetic oligonucleotide
acccgtgacaatgctg

SEQ ID NO: 2808 - DNA, 16 bp, Artificial sequence
  Synthetic oligonucleotide
aaatagtcctgcatga

SEQ ID NO: 2809 - DNA, 16 bp, Artificial sequence
  Synthetic oligonucleotide
ctgagaaacccgtgga

SEQ ID NO: 2810 - DNA, 16 bp, Artificial sequence
  Synthetic oligonucleotide
cgtcaggtccacacaa

SEQ ID NO: 2811 - DNA, 16 bp, Artificial sequence
  Synthetic oligonucleotide
ccaagggctcaggttg

SEQ ID NO: 2812 - DNA, 16 bp, Artificial sequence
  Synthetic oligonucleotide
tcgatgggataggaag

SEQ ID NO: 2813 - DNA, 16 bp, Artificial sequence
  Synthetic oligonucleotide
agtaccacagcctgtg

SEQ ID NO: 2814 - DNA, 16 bp, Artificial sequence
  Synthetic oligonucleotide
gttaacccctggcatg

SEQ ID NO: 2815 - DNA, 16 bp, Artificial sequence
  Synthetic oligonucleotide
cttcaggtcctacctc

SEQ ID NO: 2816 - DNA, 16 bp, Artificial sequence
  Synthetic oligonucleotide
catgaactgcatcagt

SEQ ID NO: 2817 - DNA, 16 bp, Artificial sequence
  Synthetic oligonucleotide
ttgtacgatgaaggat

SEQ ID NO: 2818 - DNA, 16 bp, Artificial sequence
  Synthetic oligonucleotide
cttcgcccaccagctc

SEQ ID NO: 2819 - DNA, 16 bp, Artificial sequence
  Synthetic oligonucleotide
gctgagcaatgaagga

SEQ ID NO: 2820 - DNA, 16 bp, Artificial sequence
  Synthetic oligonucleotide
aggttggattcgacat

SEQ ID NO: 2821 - DNA, 16 bp, Artificial sequence
  Synthetic oligonucleotide
ctctggttaggacagc

SEQ ID NO: 2822 - DNA, 16 bp, Artificial sequence
  Synthetic oligonucleotide
ttatggtatatcctca

SEQ ID NO: 2823 - DNA, 16 bp, Artificial sequence
  Synthetic oligonucleotide
gagagacattgtagct

SEQ ID NO: 2824 - DNA, 16 bp, Artificial sequence
  Synthetic oligonucleotide
ggaggagcactttgca

SEQ ID NO: 2825 - DNA, 16 bp, Artificial sequence
  Synthetic oligonucleotide
tccgctgcaaactcat

SEQ ID NO: 2826 - DNA, 16 bp, Artificial sequence
  Synthetic oligonucleotide
tatagttccatcacta

SEQ ID NO: 2827 - DNA, 16 bp, Artificial sequence
  Synthetic oligonucleotide
gaggcataatgtaatc

SEQ ID NO: 2828 - DNA, 16 bp, Artificial sequence
  Synthetic oligonucleotide
cccagtacctagacat

SEQ ID NO: 2829 - DNA, 16 bp, Artificial sequence
  Synthetic oligonucleotide
tgggcatgaaaaccca

SEQ ID NO: 2830 - DNA, 16 bp, Artificial sequence
  Synthetic oligonucleotide
cttaaatcgcaatacc

SEQ ID NO: 2831 - DNA, 16 bp, Artificial sequence
  Synthetic oligonucleotide
acttagctctctaatt

SEQ ID NO: 2832 - DNA, 16 bp, Artificial sequence
  Synthetic oligonucleotide
gctgtaatctagagca

SEQ ID NO: 2833 - DNA, 16 bp, Artificial sequence
  Synthetic oligonucleotide
atggctataggttctg

SEQ ID NO: 2834 - DNA, 16 bp, Artificial sequence
  Synthetic oligonucleotide
tccaaatgaccattgc

SEQ ID NO: 2835 - DNA, 16 bp, Artificial sequence
  Synthetic oligonucleotide
cctacggaggatgcta

SEQ ID NO: 2836 - DNA, 16 bp, Artificial sequence
  Synthetic oligonucleotide
gctcctaccttaagga

SEQ ID NO: 2837 - DNA, 16 bp, Artificial sequence
  Synthetic oligonucleotide
tgggagcataggtcat

SEQ ID NO: 2838 - DNA, 16 bp, Artificial sequence
  Synthetic oligonucleotide
aggatacacactttat

SEQ ID NO: 2839 - DNA, 16 bp, Artificial sequence
  Synthetic oligonucleotide
gcaggacaacacttat

SEQ ID NO: 2840 - DNA, 16 bp, Artificial sequence
  Synthetic oligonucleotide
catgaaccaccctgtt

SEQ ID NO: 2841 - DNA, 16 bp, Artificial sequence
  Synthetic oligonucleotide
aagggcactggatatg

SEQ ID NO: 2842 - DNA, 16 bp, Artificial sequence
  Synthetic oligonucleotide
tctatatgccactcta

SEQ ID NO: 2843 - DNA, 16 bp, Artificial sequence
  Synthetic oligonucleotide
tagaggttcttctgga

SEQ ID NO: 2844 - DNA, 16 bp, Artificial sequence
  Synthetic oligonucleotide
aaaggtttatggtggt

SEQ ID NO: 2845 - DNA, 16 bp, Artificial sequence
  Synthetic oligonucleotide
aatgttaaactaagtc

SEQ ID NO: 2846 - DNA, 16 bp, Artificial sequence
  Synthetic oligonucleotide
gatctaaactggtttc

SEQ ID NO: 2847 - DNA, 16 bp, Artificial sequence
  Synthetic oligonucleotide
cttaaatcctgcccat

SEQ ID NO: 2848 - DNA, 16 bp, Artificial sequence
  Synthetic oligonucleotide
caacctattgatagtc

SEQ ID NO: 2849 - DNA, 16 bp, Artificial sequence
  Synthetic oligonucleotide
cttcctataactggtc

SEQ ID NO: 2850 - DNA, 16 bp, Artificial sequence
  Synthetic oligonucleotide
aactttgatacagtta

SEQ ID NO: 2851 - DNA, 16 bp, Artificial sequence
  Synthetic oligonucleotide
ggttattagcacattg

SEQ ID NO: 2852 - DNA, 16 bp, Artificial sequence
  Synthetic oligonucleotide
tatattaggttgatac

SEQ ID NO: 2853 - DNA, 16 bp, Artificial sequence
  Synthetic oligonucleotide
tgtatagaaaacttgt

SEQ ID NO: 2854 - DNA, 16 bp, Artificial sequence
  Synthetic oligonucleotide
aatcctgagatactgt

SEQ ID NO: 2855 - DNA, 16 bp, Artificial sequence
  Synthetic oligonucleotide
tagcttaaaaccacta

SEQ ID NO: 2856 - DNA, 16 bp, Artificial sequence
  Synthetic oligonucleotide
ttaatgagaagtggtt

SEQ ID NO: 2857 - DNA, 16 bp, Artificial sequence
  Synthetic oligonucleotide
atgaaagttctggttc

SEQ ID NO: 2858 - DNA, 16 bp, Artificial sequence
  Synthetic oligonucleotide
ctaatctacttagctc

SEQ ID NO: 2859 - DNA, 16 bp, Artificial sequence
  Synthetic oligonucleotide
cataatcatccgtccc

SEQ ID NO: 2860 - DNA, 16 bp, Artificial sequence
  Synthetic oligonucleotide
acttatctaatgaagg

SEQ ID NO: 2861 - DNA, 16 bp, Artificial sequence
  Synthetic oligonucleotide
cttgtaaagcataggc

SEQ ID NO: 2862 - DNA, 16 bp, Artificial sequence
  Synthetic oligonucleotide
acacttatgtgatcac

SEQ ID NO: 2863 - DNA, 16 bp, Artificial sequence
  Synthetic oligonucleotide
tcccgtgcgcaggcca

SEQ ID NO: 2864 - DNA, 16 bp, Artificial sequence
  Synthetic oligonucleotide
ccggccgactactgga

SEQ ID NO: 2865 - DNA, 16 bp, Artificial sequence
  Synthetic oligonucleotide
ccgagaaactggctcc

SEQ ID NO: 2866 - DNA, 16 bp, Artificial sequence
  Synthetic oligonucleotide
tggcaccctcactgga

SEQ ID NO: 2867 - DNA, 16 bp, Artificial sequence
  Synthetic oligonucleotide
tccgccacagggactg

SEQ ID NO: 2868 - DNA, 16 bp, Artificial sequence
  Synthetic oligonucleotide
ccagcggacgggagag

SEQ ID NO: 2869 - DNA, 16 bp, Artificial sequence
  Synthetic oligonucleotide
atggctcgagagggtt

SEQ ID NO: 2870 - DNA, 16 bp, Artificial sequence
  Synthetic oligonucleotide
aaaacaagcggttcgc

SEQ ID NO: 2871 - DNA, 16 bp, Artificial sequence
  Synthetic oligonucleotide
gcgcagctaacccagc

SEQ ID NO: 2872 - DNA, 16 bp, Artificial sequence
  Synthetic oligonucleotide
ctcctatcagtctgat

SEQ ID NO: 2873 - DNA, 16 bp, Artificial sequence
  Synthetic oligonucleotide
aaccagcctcaccgtt

SEQ ID NO: 2874 - DNA, 16 bp, Artificial sequence
  Synthetic oligonucleotide
caccttcacagctccc

SEQ ID NO: 2875 - DNA, 16 bp, Artificial sequence
  Synthetic oligonucleotide
aggaccccaaggctta

SEQ ID NO: 2876 - DNA, 16 bp, Artificial sequence
  Synthetic oligonucleotide
gctgtatttccgtggc

SEQ ID NO: 2877 - DNA, 16 bp, Artificial sequence
  Synthetic oligonucleotide
gaaaccggatgctgtg

SEQ ID NO: 2878 - DNA, 16 bp, Artificial sequence
  Synthetic oligonucleotide
ctgaaacttcgccggg

SEQ ID NO: 2879 - DNA, 16 bp, Artificial sequence
  Synthetic oligonucleotide
ccctggaggattcgcc

SEQ ID NO: 2880 - DNA, 16 bp, Artificial sequence
  Synthetic oligonucleotide
atattaagatgtagcc

SEQ ID NO: 2881 - DNA, 16 bp, Artificial sequence
  Synthetic oligonucleotide
aggatggatcagattc

SEQ ID NO: 2882 - DNA, 16 bp, Artificial sequence
  Synthetic oligonucleotide
gccaggtttctatgat

SEQ ID NO: 2883 - DNA, 16 bp, Artificial sequence
  Synthetic oligonucleotide
agggacccgtgacaat

SEQ ID NO: 2884 - DNA, 16 bp, Artificial sequence
  Synthetic oligonucleotide
cgagagttgttcaaga

SEQ ID NO: 2885 - DNA, 16 bp, Artificial sequence
  Synthetic oligonucleotide
cactgagaaacccgtg

SEQ ID NO: 2886 - DNA, 16 bp, Artificial sequence
  Synthetic oligonucleotide
gtattctgacccattc

SEQ ID NO: 2887 - DNA, 16 bp, Artificial sequence
  Synthetic oligonucleotide
gacagcgatgatagga

SEQ ID NO: 2888 - DNA, 16 bp, Artificial sequence
  Synthetic oligonucleotide
taggcatattgcagag

SEQ ID NO: 2889 - DNA, 16 bp, Artificial sequence
  Synthetic oligonucleotide
tcagtaccacagcctg

SEQ ID NO: 2890 - DNA, 16 bp, Artificial sequence
  Synthetic oligonucleotide
catcactggctgttca

SEQ ID NO: 2891 - DNA, 16 bp, Artificial sequence
  Synthetic oligonucleotide
tcaacttcaggtccta

SEQ ID NO: 2892 - DNA, 16 bp, Artificial sequence
  Synthetic oligonucleotide
tcatgaactgcatcag

SEQ ID NO: 2893 - DNA, 16 bp, Artificial sequence
  Synthetic oligonucleotide
cattgtacgatgaagg

SEQ ID NO: 2894 - DNA, 16 bp, Artificial sequence
  Synthetic oligonucleotide
tgcttcgcccaccagc

SEQ ID NO: 2895 - DNA, 16 bp, Artificial sequence
  Synthetic oligonucleotide
ctcgagttgcacaaag

SEQ ID NO: 2896 - DNA, 16 bp, Artificial sequence
  Synthetic oligonucleotide
agcaggttggattcga

SEQ ID NO: 2897 - DNA, 16 bp, Artificial sequence
  Synthetic oligonucleotide
atttatgtgctctggt

SEQ ID NO: 2898 - DNA, 16 bp, Artificial sequence
  Synthetic oligonucleotide
gcatttctatgaggga

SEQ ID NO: 2899 - DNA, 16 bp, Artificial sequence
  Synthetic oligonucleotide
tgagcaatgacagata

SEQ ID NO: 2900 - DNA, 16 bp, Artificial sequence
  Synthetic oligonucleotide
cactcataagatatgg

SEQ ID NO: 2901 - DNA, 16 bp, Artificial sequence
  Synthetic oligonucleotide
ccatccgctgcaaact

SEQ ID NO: 2902 - DNA, 16 bp, Artificial sequence
  Synthetic oligonucleotide
gcctgaagggccatga

SEQ ID NO: 2903 - DNA, 16 bp, Artificial sequence
  Synthetic oligonucleotide
ggagagttctaagtcc

SEQ ID NO: 2904 - DNA, 16 bp, Artificial sequence
  Synthetic oligonucleotide
cttagcacatcagggc

SEQ ID NO: 2905 - DNA, 16 bp, Artificial sequence
  Synthetic oligonucleotide
atgctacatcctttgc

SEQ ID NO: 2906 - DNA, 16 bp, Artificial sequence
  Synthetic oligonucleotide
tgagcgaggcacatct

SEQ ID NO: 2907 - DNA, 16 bp, Artificial sequence
  Synthetic oligonucleotide
atacttaaatcgcaat

SEQ ID NO: 2908 - DNA, 16 bp, Artificial sequence
  Synthetic oligonucleotide
tctacttagctctcta

SEQ ID NO: 2909 - DNA, 16 bp, Artificial sequence
  Synthetic oligonucleotide
ttcctaactgtcagcc

SEQ ID NO: 2910 - DNA, 16 bp, Artificial sequence
  Synthetic oligonucleotide
ggaatagatggctata

SEQ ID NO: 2911 - DNA, 16 bp, Artificial sequence
  Synthetic oligonucleotide
tcagtatccaaatgac

SEQ ID NO: 2912 - DNA, 16 bp, Artificial sequence
  Synthetic oligonucleotide
tgcctacggaggatgc

SEQ ID NO: 2913 - DNA, 16 bp, Artificial sequence
  Synthetic oligonucleotide
aagtgagacatggctc

SEQ ID NO: 2914 - DNA, 16 bp, Artificial sequence
  Synthetic oligonucleotide
gagtctgggagcatag

SEQ ID NO: 2915 - DNA, 16 bp, Artificial sequence
  Synthetic oligonucleotide
agcagtaaacttagat

SEQ ID NO: 2916 - DNA, 16 bp, Artificial sequence
  Synthetic oligonucleotide
agggcaggacaacact

SEQ ID NO: 2917 - DNA, 16 bp, Artificial sequence
  Synthetic oligonucleotide
aatacgccacatgaac

SEQ ID NO: 2918 - DNA, 16 bp, Artificial sequence
  Synthetic oligonucleotide
cccaaggttgcatttg

SEQ ID NO: 2919 - DNA, 16 bp, Artificial sequence
  Synthetic oligonucleotide
ggaaatctatatgcca

SEQ ID NO: 2920 - DNA, 16 bp, Artificial sequence
  Synthetic oligonucleotide
attaaggaccccaagg

SEQ ID NO: 2921 - DNA, 16 bp, Artificial sequence
  Synthetic oligonucleotide
gcaatttctcaagttc

SEQ ID NO: 2922 - DNA, 16 bp, Artificial sequence
  Synthetic oligonucleotide
acaatggagatactgt

SEQ ID NO: 2923 - DNA, 16 bp, Artificial sequence
  Synthetic oligonucleotide
ctggattatgcaaagc

SEQ ID NO: 2924 - DNA, 16 bp, Artificial sequence
  Synthetic oligonucleotide
gtattgacttaaatcc

SEQ ID NO: 2925 - DNA, 16 bp, Artificial sequence
  Synthetic oligonucleotide
acaacctattgatagt

SEQ ID NO: 2926 - DNA, 16 bp, Artificial sequence
  Synthetic oligonucleotide
cagaatgagcttacaa

SEQ ID NO: 2927 - DNA, 16 bp, Artificial sequence
  Synthetic oligonucleotide
taactttgatacagtt

SEQ ID NO: 2928 - DNA, 16 bp, Artificial sequence
  Synthetic oligonucleotide
ttttattgggttgtca

SEQ ID NO: 2929 - DNA, 16 bp, Artificial sequence
  Synthetic oligonucleotide
agtgatagctacctgc

SEQ ID NO: 2930 - DNA, 16 bp, Artificial sequence
  Synthetic oligonucleotide
attaacaaatctgtcc

SEQ ID NO: 2931 - DNA, 16 bp, Artificial sequence
  Synthetic oligonucleotide
tgggaaatgtccttcc

SEQ ID NO: 2932 - DNA, 16 bp, Artificial sequence
  Synthetic oligonucleotide
atagcttaaaaccact

SEQ ID NO: 2933 - DNA, 16 bp, Artificial sequence
  Synthetic oligonucleotide
tttaatgagaagtggt

SEQ ID NO: 2934 - DNA, 16 bp, Artificial sequence
  Synthetic oligonucleotide
gcttatgaaactaaca

SEQ ID NO: 2935 - DNA, 16 bp, Artificial sequence
  Synthetic oligonucleotide
atgttaagttgtcact

SEQ ID NO: 2936 - DNA, 16 bp, Artificial sequence
  Synthetic oligonucleotide
caaagtgtactttggt

SEQ ID NO: 2937 - DNA, 16 bp, Artificial sequence
  Synthetic oligonucleotide
ttaattatcttgcccc

SEQ ID NO: 2938 - DNA, 16 bp, Artificial sequence
  Synthetic oligonucleotide
taggcaattcttgtaa

SEQ ID NO: 2939 - DNA, 16 bp, Artificial sequence
  Synthetic oligonucleotide
agcttgtaactctgat

SEQ ID NO: 2940 - DNA, 16 bp, Artificial sequence
  Synthetic oligonucleotide
tgagactcccgtgcgc

SEQ ID NO: 2941 - DNA, 16 bp, Artificial sequence
  Synthetic oligonucleotide
agtccggccgactact

SEQ ID NO: 2942 - DNA, 16 bp, Artificial sequence
  Synthetic oligonucleotide
tgaccgagaaactggc

SEQ ID NO: 2943 - DNA, 16 bp, Artificial sequence
  Synthetic oligonucleotide
tgcgctttctggcacc

SEQ ID NO: 2944 - DNA, 16 bp, Artificial sequence
  Synthetic oligonucleotide
tctcgggatgtccgcc

SEQ ID NO: 2945 - DNA, 16 bp, Artificial sequence
  Synthetic oligonucleotide
agtagatgtccagcgg

SEQ ID NO: 2946 - DNA, 16 bp, Artificial sequence
  Synthetic oligonucleotide
tccggagaggtggtgc

SEQ ID NO: 2947 - DNA, 16 bp, Artificial sequence
  Synthetic oligonucleotide
acggaacatcttttgc

SEQ ID NO: 2948 - DNA, 16 bp, Artificial sequence
  Synthetic oligonucleotide
acctgcgcagctaacc

SEQ ID NO: 2949 - DNA, 16 bp, Artificial sequence
  Synthetic oligonucleotide
agctcctatcagtctg

SEQ ID NO: 2950 - DNA, 16 bp, Artificial sequence
  Synthetic oligonucleotide
gaggacaagctcatgg

SEQ ID NO: 2951 - DNA, 16 bp, Artificial sequence
  Synthetic oligonucleotide
ccaccttcacagctcc

SEQ ID NO: 2952 - DNA, 16 bp, Artificial sequence
  Synthetic oligonucleotide
gagtagctccagcaac

SEQ ID NO: 2953 - DNA, 16 bp, Artificial sequence
  Synthetic oligonucleotide
gggagaaaccggatgc

SEQ ID NO: 2954 - DNA, 16 bp, Artificial sequence
  Synthetic oligonucleotide
tgctgaaacttcgccg

SEQ ID NO: 2955 - DNA, 16 bp, Artificial sequence
  Synthetic oligonucleotide
gccctggaggattcgc

SEQ ID NO: 2956 - DNA, 16 bp, Artificial sequence
  Synthetic oligonucleotide
gagtcaaagtcagtta

SEQ ID NO: 2957 - DNA, 16 bp, Artificial sequence
  Synthetic oligonucleotide
ctccccgttgcctgta

SEQ ID NO: 2958 - DNA, 16 bp, Artificial sequence
  Synthetic oligonucleotide
gtatttgctgccaggt

SEQ ID NO: 2959 - DNA, 16 bp, Artificial sequence
  Synthetic oligonucleotide
ctgagggacccgtgac

SEQ ID NO: 2960 - DNA, 16 bp, Artificial sequence
  Synthetic oligonucleotide
ctctggtacacgagag

SEQ ID NO: 2961 - DNA, 16 bp, Artificial sequence
  Synthetic oligonucleotide
caaatggaccactgag

SEQ ID NO: 2962 - DNA, 16 bp, Artificial sequence
  Synthetic oligonucleotide
cagtattctgacccat

SEQ ID NO: 2963 - DNA, 16 bp, Artificial sequence
  Synthetic oligonucleotide
tgaagacagcgatgat

SEQ ID NO: 2964 - DNA, 16 bp, Artificial sequence
  Synthetic oligonucleotide
gtggtaggatgaacat

SEQ ID NO: 2965 - DNA, 16 bp, Artificial sequence
  Synthetic oligonucleotide
atgtcccaactgtcct

SEQ ID NO: 2966 - DNA, 16 bp, Artificial sequence
  Synthetic oligonucleotide
gccgaggtaatttctt

SEQ ID NO: 2967 - DNA, 16 bp, Artificial sequence
  Synthetic oligonucleotide
gctccgggacccatgc

SEQ ID NO: 2968 - DNA, 16 bp, Artificial sequence
  Synthetic oligonucleotide
gtcatgaactgcatca

SEQ ID NO: 2969 - DNA, 16 bp, Artificial sequence
  Synthetic oligonucleotide
acttactccaccagat

SEQ ID NO: 2970 - DNA, 16 bp, Artificial sequence
  Synthetic oligonucleotide
atatgcttcgcccacc

SEQ ID NO: 2971 - DNA, 16 bp, Artificial sequence
  Synthetic oligonucleotide
agctcgagttgcacaa

SEQ ID NO: 2972 - DNA, 16 bp, Artificial sequence
  Synthetic oligonucleotide
catggacaagatgtaa

SEQ ID NO: 2973 - DNA, 16 bp, Artificial sequence
  Synthetic oligonucleotide
cgtgcaaagcctgact

SEQ ID NO: 2974 - DNA, 16 bp, Artificial sequence
  Synthetic oligonucleotide
cattgattgtagcatt

SEQ ID NO: 2975 - DNA, 16 bp, Artificial sequence
  Synthetic oligonucleotide
ttgcaactggaactgg

SEQ ID NO: 2976 - DNA, 16 bp, Artificial sequence
  Synthetic oligonucleotide
gaatgggttcaaggca

SEQ ID NO: 2977 - DNA, 16 bp, Artificial sequence
  Synthetic oligonucleotide
atccagcatagaggtt

SEQ ID NO: 2978 - DNA, 16 bp, Artificial sequence
  Synthetic oligonucleotide
aaggcttacacttcct

SEQ ID NO: 2979 - DNA, 16 bp, Artificial sequence
  Synthetic oligonucleotide
ctcgaggtgcagggcc

SEQ ID NO: 2980 - DNA, 16 bp, Artificial sequence
  Synthetic oligonucleotide
ccagatcctctaagtt

SEQ ID NO: 2981 - DNA, 16 bp, Artificial sequence
  Synthetic oligonucleotide
actactttgctagttc

SEQ ID NO: 2982 - DNA, 16 bp, Artificial sequence
  Synthetic oligonucleotide
aagagatgctacatcc

SEQ ID NO: 2983 - DNA, 16 bp, Artificial sequence
  Synthetic oligonucleotide
aggtttgagcgaggca

SEQ ID NO: 2984 - DNA, 16 bp, Artificial sequence
  Synthetic oligonucleotide
agtggattagtaaata

SEQ ID NO: 2985 - DNA, 16 bp, Artificial sequence
  Synthetic oligonucleotide
taatctacttagctct

SEQ ID NO: 2986 - DNA, 16 bp, Artificial sequence
  Synthetic oligonucleotide
gatagttcctaactgt

SEQ ID NO: 2987 - DNA, 16 bp, Artificial sequence
  Synthetic oligonucleotide
gtcaaggaatagatgg

SEQ ID NO: 2988 - DNA, 16 bp, Artificial sequence
  Synthetic oligonucleotide
tgattgaagcccactc

SEQ ID NO: 2989 - DNA, 16 bp, Artificial sequence
  Synthetic oligonucleotide
gtaatgcctacggagg

SEQ ID NO: 2990 - DNA, 16 bp, Artificial sequence
  Synthetic oligonucleotide
ataagtgagacatggc

SEQ ID NO: 2991 - DNA, 16 bp, Artificial sequence
  Synthetic oligonucleotide
ccgggactccctggta

SEQ ID NO: 2992 - DNA, 16 bp, Artificial sequence
  Synthetic oligonucleotide
aaccgtgataagcagt

SEQ ID NO: 2993 - DNA, 16 bp, Artificial sequence
  Synthetic oligonucleotide
ttaacagagtgctagc

SEQ ID NO: 2994 - DNA, 16 bp, Artificial sequence
  Synthetic oligonucleotide
ggaatacgccacatga

SEQ ID NO: 2995 - DNA, 16 bp, Artificial sequence
  Synthetic oligonucleotide
tgatcaaaggcaagct

SEQ ID NO: 2996 - DNA, 16 bp, Artificial sequence
  Synthetic oligonucleotide
acccctggaaatctat

SEQ ID NO: 2997 - DNA, 16 bp, Artificial sequence
  Synthetic oligonucleotide
tctggattaaggaccc

SEQ ID NO: 2998 - DNA, 16 bp, Artificial sequence
  Synthetic oligonucleotide
aacctaatcaccctgc

SEQ ID NO: 2999 - DNA, 16 bp, Artificial sequence
  Synthetic oligonucleotide
caaccttagacacctg

SEQ ID NO: 3000 - DNA, 16 bp, Artificial sequence
  Synthetic oligonucleotide
gcaaagcaactggatt

SEQ ID NO: 3001 - DNA, 16 bp, Artificial sequence
  Synthetic oligonucleotide
taccttaggtcacagg

SEQ ID NO: 3002 - DNA, 16 bp, Artificial sequence
  Synthetic oligonucleotide
ctaattcctcacacaa

SEQ ID NO: 3003 - DNA, 16 bp, Artificial sequence
  Synthetic oligonucleotide
cttaacatcattgtca

SEQ ID NO: 3004 - DNA, 16 bp, Artificial sequence
  Synthetic oligonucleotide
ctaactttgatacagt

SEQ ID NO: 3005 - DNA, 16 bp, Artificial sequence
  Synthetic oligonucleotide
attttattgggttgtc

SEQ ID NO: 3006 - DNA, 16 bp, Artificial sequence
  Synthetic oligonucleotide
aagtgatagctacctg

SEQ ID NO: 3007 - DNA, 16 bp, Artificial sequence
  Synthetic oligonucleotide
agattacataagagga

SEQ ID NO: 3008 - DNA, 16 bp, Artificial sequence
  Synthetic oligonucleotide
aaagggattcactttg

SEQ ID NO: 3009 - DNA, 16 bp, Artificial sequence
  Synthetic oligonucleotide
cttatcagaacttctg

SEQ ID NO: 3010 - DNA, 16 bp, Artificial sequence
  Synthetic oligonucleotide
gtttaatgagaagtgg

SEQ ID NO: 3011 - DNA, 16 bp, Artificial sequence
  Synthetic oligonucleotide
atcgcttatgaaacta

SEQ ID NO: 3012 - DNA, 16 bp, Artificial sequence
  Synthetic oligonucleotide
catttgccgggcatgc

SEQ ID NO: 3013 - DNA, 16 bp, Artificial sequence
  Synthetic oligonucleotide
agtattgaaaggagca

SEQ ID NO: 3014 - DNA, 16 bp, Artificial sequence
  Synthetic oligonucleotide
ccttaattatcttgcc

SEQ ID NO: 3015 - DNA, 16 bp, Artificial sequence
  Synthetic oligonucleotide
catttgcggcttgcag

SEQ ID NO: 3016 - DNA, 16 bp, Artificial sequence
  Synthetic oligonucleotide
aagtagcttgtaactc

SEQ ID NO: 3017 - DNA, 16 bp, Artificial sequence
  Synthetic oligonucleotide
ccaactgagactcccg

SEQ ID NO: 3018 - DNA, 16 bp, Artificial sequence
  Synthetic oligonucleotide
cctcttgggtgcgaat

SEQ ID NO: 3019 - DNA, 16 bp, Artificial sequence
  Synthetic oligonucleotide
agtgttgaccgagaaa

SEQ ID NO: 3020 - DNA, 16 bp, Artificial sequence
  Synthetic oligonucleotide
cgctgcgctttctggc

SEQ ID NO: 3021 - DNA, 16 bp, Artificial sequence
  Synthetic oligonucleotide
caacactctcgggatg

SEQ ID NO: 3022 - DNA, 16 bp, Artificial sequence
  Synthetic oligonucleotide
ggagtagatgtccagc

SEQ ID NO: 3023 - DNA, 16 bp, Artificial sequence
  Synthetic oligonucleotide
ggctccggagaggtgg

SEQ ID NO: 3024 - DNA, 16 bp, Artificial sequence
  Synthetic oligonucleotide
gcaacggaacatcttt

SEQ ID NO: 3025 - DNA, 16 bp, Artificial sequence
  Synthetic oligonucleotide
aatagagacctgcgca

SEQ ID NO: 3026 - DNA, 16 bp, Artificial sequence
  Synthetic oligonucleotide
ttgtttatagctccta

SEQ ID NO: 3027 - DNA, 16 bp, Artificial sequence
  Synthetic oligonucleotide
tctgaggacaagctca

SEQ ID NO: 3028 - DNA, 16 bp, Artificial sequence
  Synthetic oligonucleotide
accaccttcacagctc

SEQ ID NO: 3029 - DNA, 16 bp, Artificial sequence
  Synthetic oligonucleotide
atgagtagctccagca

SEQ ID NO: 3030 - DNA, 16 bp, Artificial sequence
  Synthetic oligonucleotide
gccagaccctaaaggg

SEQ ID NO: 3031 - DNA, 16 bp, Artificial sequence
  Synthetic oligonucleotide
cttagcaactcctctg

SEQ ID NO: 3032 - DNA, 16 bp, Artificial sequence
  Synthetic oligonucleotide
aggccctggaggattc

SEQ ID NO: 3033 - DNA, 16 bp, Artificial sequence
  Synthetic oligonucleotide
cggagtcaaagtcagt

SEQ ID NO: 3034 - DNA, 16 bp, Artificial sequence
  Synthetic oligonucleotide
tcctccccgttgcctg

SEQ ID NO: 3035 - DNA, 16 bp, Artificial sequence
  Synthetic oligonucleotide
agaggtatttgctgcc

SEQ ID NO: 3036 - DNA, 16 bp, Artificial sequence
  Synthetic oligonucleotide
gcctgagggacccgtg

SEQ ID NO: 3037 - DNA, 16 bp, Artificial sequence
  Synthetic oligonucleotide
cttagcacctgcaata

SEQ ID NO: 3038 - DNA, 16 bp, Artificial sequence
  Synthetic oligonucleotide
tccaacttggaatcaa

SEQ ID NO: 3039 - DNA, 16 bp, Artificial sequence
  Synthetic oligonucleotide
gtggcttaattccagt

SEQ ID NO: 3040 - DNA, 16 bp, Artificial sequence
  Synthetic oligonucleotide
taaacaagtctgggat

SEQ ID NO: 3041 - DNA, 16 bp, Artificial sequence
  Synthetic oligonucleotide
cagtggtaggatgaac

SEQ ID NO: 3042 - DNA, 16 bp, Artificial sequence
  Synthetic oligonucleotide
acccttcaatgatgtc

SEQ ID NO: 3043 - DNA, 16 bp, Artificial sequence
  Synthetic oligonucleotide
cagccgaggtaatttc

SEQ ID NO: 3044 - DNA, 16 bp, Artificial sequence
  Synthetic oligonucleotide
acagaggctccgggac

SEQ ID NO: 3045 - DNA, 16 bp, Artificial sequence
  Synthetic oligonucleotide
agtcatgaactgcatc

SEQ ID NO: 3046 - DNA, 16 bp, Artificial sequence
  Synthetic oligonucleotide
gaagacttactccacc

SEQ ID NO: 3047 - DNA, 16 bp, Artificial sequence
  Synthetic oligonucleotide
gcccatatgcttcgcc

SEQ ID NO: 3048 - DNA, 16 bp, Artificial sequence
  Synthetic oligonucleotide
gtgggaagctcgagtt

SEQ ID NO: 3049 - DNA, 16 bp, Artificial sequence
  Synthetic oligonucleotide
catacggtcttcttaa

SEQ ID NO: 3050 - DNA, 16 bp, Artificial sequence
  Synthetic oligonucleotide
caaggtaagggtcccg

SEQ ID NO: 3051 - DNA, 16 bp, Artificial sequence
  Synthetic oligonucleotide
gacattgattgtagca

SEQ ID NO: 3052 - DNA, 16 bp, Artificial sequence
  Synthetic oligonucleotide
catattgcaactggaa

SEQ ID NO: 3053 - DNA, 16 bp, Artificial sequence
  Synthetic oligonucleotide
tcaaccacattatatg

SEQ ID NO: 3054 - DNA, 16 bp, Artificial sequence
  Synthetic oligonucleotide
taatgggttgtgagcc

SEQ ID NO: 3055 - DNA, 16 bp, Artificial sequence
  Synthetic oligonucleotide
acgggatgaaggctta

SEQ ID NO: 3056 - DNA, 16 bp, Artificial sequence
  Synthetic oligonucleotide
tgcctcgaggtgcagg

SEQ ID NO: 3057 - DNA, 16 bp, Artificial sequence
  Synthetic oligonucleotide
accttccttccagatc

SEQ ID NO: 3058 - DNA, 16 bp, Artificial sequence
  Synthetic oligonucleotide
tgataactactttgct

SEQ ID NO: 3059 - DNA, 16 bp, Artificial sequence
  Synthetic oligonucleotide
gacaaccaactcagag

SEQ ID NO: 3060 - DNA, 16 bp, Artificial sequence
  Synthetic oligonucleotide
acaaggtttgagcgag

SEQ ID NO: 3061 - DNA, 16 bp, Artificial sequence
  Synthetic oligonucleotide
aagagtggattagtaa

SEQ ID NO: 3062 - DNA, 16 bp, Artificial sequence
  Synthetic oligonucleotide
accctaatctacttag

SEQ ID NO: 3063 - DNA, 16 bp, Artificial sequence
  Synthetic oligonucleotide
agaagagatagttcct

SEQ ID NO: 3064 - DNA, 16 bp, Artificial sequence
  Synthetic oligonucleotide
cagtctagtgcaaccc

SEQ ID NO: 3065 - DNA, 16 bp, Artificial sequence
  Synthetic oligonucleotide
ctgtgattgaagccca

SEQ ID NO: 3066 - DNA, 16 bp, Artificial sequence
  Synthetic oligonucleotide
gaggcctttgcatagc

SEQ ID NO: 3067 - DNA, 16 bp, Artificial sequence
  Synthetic oligonucleotide
gatgtaccaagataag

SEQ ID NO: 3068 - DNA, 16 bp, Artificial sequence
  Synthetic oligonucleotide
gaccgggactccctgg

SEQ ID NO: 3069 - DNA, 16 bp, Artificial sequence
  Synthetic oligonucleotide
ttaaccgtgataagca

SEQ ID NO: 3070 - DNA, 16 bp, Artificial sequence
  Synthetic oligonucleotide
ggtgttaacagagtgc

SEQ ID NO: 3071 - DNA, 16 bp, Artificial sequence
  Synthetic oligonucleotide
gtgggaatacgccaca

SEQ ID NO: 3072 - DNA, 16 bp, Artificial sequence
  Synthetic oligonucleotide
ctgggaagccacgctg

SEQ ID NO: 3073 - DNA, 16 bp, Artificial sequence
  Synthetic oligonucleotide
ttgggtatggaaaccc

SEQ ID NO: 3074 - DNA, 16 bp, Artificial sequence
  Synthetic oligonucleotide
ttctggattaaggacc

SEQ ID NO: 3075 - DNA, 16 bp, Artificial sequence
  Synthetic oligonucleotide
acaaacctaatcaccc

SEQ ID NO: 3076 - DNA, 16 bp, Artificial sequence
  Synthetic oligonucleotide
actatagtagaaggag

SEQ ID NO: 3077 - DNA, 16 bp, Artificial sequence
  Synthetic oligonucleotide
tttataatgcttcagc

SEQ ID NO: 3078 - DNA, 16 bp, Artificial sequence
  Synthetic oligonucleotide
tcatttgaagatgttc

SEQ ID NO: 3079 - DNA, 16 bp, Artificial sequence
  Synthetic oligonucleotide
cgttttgaagacagcg

SEQ ID NO: 3080 - DNA, 16 bp, Artificial sequence
  Synthetic oligonucleotide
ggattaaatgcattgc

SEQ ID NO: 3081 - DNA, 16 bp, Artificial sequence
  Synthetic oligonucleotide
tattttagctagagca

SEQ ID NO: 3082 - DNA, 16 bp, Artificial sequence
  Synthetic oligonucleotide
agcatttatgtgctct

SEQ ID NO: 3083 - DNA, 16 bp, Artificial sequence
  Synthetic oligonucleotide
taagtgatagctacct

SEQ ID NO: 3084 - DNA, 16 bp, Artificial sequence
  Synthetic oligonucleotide
tagattacataagagg

SEQ ID NO: 3085 - DNA, 16 bp, Artificial sequence
  Synthetic oligonucleotide
atagaggttcttctgg

SEQ ID NO: 3086 - DNA, 16 bp, Artificial sequence
  Synthetic oligonucleotide
gcttatcagaacttct

SEQ ID NO: 3087 - DNA, 16 bp, Artificial sequence
  Synthetic oligonucleotide
gtattgaaatgttgta

SEQ ID NO: 3088 - DNA, 16 bp, Artificial sequence
  Synthetic oligonucleotide
aaggtttgagcgaggc

SEQ ID NO: 3089 - DNA, 16 bp, Artificial sequence
  Synthetic oligonucleotide
tccataaagatcacag

SEQ ID NO: 3090 - DNA, 16 bp, Artificial sequence
  Synthetic oligonucleotide
agtaagtagctaacag

SEQ ID NO: 3091 - DNA, 16 bp, Artificial sequence
  Synthetic oligonucleotide
tccttaattatcttgc

SEQ ID NO: 3092 - DNA, 16 bp, Artificial sequence
  Synthetic oligonucleotide
tttcatttgcggcttg

SEQ ID NO: 3093 - DNA, 16 bp, Artificial sequence
  Synthetic oligonucleotide
ggaagacctgaccacc

SEQ ID NO: 3094 - DNA, 16 bp, Artificial sequence
  Synthetic oligonucleotide
gcgcgcccaactgaga

SEQ ID NO: 3095 - DNA, 16 bp, Artificial sequence
  Synthetic oligonucleotide
tctagcgggctcctct

SEQ ID NO: 3096 - DNA, 16 bp, Artificial sequence
  Synthetic oligonucleotide
acctagtgttgaccga

SEQ ID NO: 3097 - DNA, 16 bp, Artificial sequence
  Synthetic oligonucleotide
tgcgctgcgctttctg

SEQ ID NO: 3098 - DNA, 16 bp, Artificial sequence
  Synthetic oligonucleotide
tccaacactctcggga

SEQ ID NO: 3099 - DNA, 16 bp, Artificial sequence
  Synthetic oligonucleotide
aagggagtagatgtcc

SEQ ID NO: 3100 - DNA, 16 bp, Artificial sequence
  Synthetic oligonucleotide
gcggctccggagaggt

SEQ ID NO: 3101 - DNA, 16 bp, Artificial sequence
  Synthetic oligonucleotide
cccgcctgcaacggaa

SEQ ID NO: 3102 - DNA, 16 bp, Artificial sequence
  Synthetic oligonucleotide
ttggcttaaatagaga

SEQ ID NO: 3103 - DNA, 16 bp, Artificial sequence
  Synthetic oligonucleotide
cccgcctctctcagtc

SEQ ID NO: 3104 - DNA, 16 bp, Artificial sequence
  Synthetic oligonucleotide
gcgagatcaccacccc

SEQ ID NO: 3105 - DNA, 16 bp, Artificial sequence
  Synthetic oligonucleotide
taccaccttcacagct

SEQ ID NO: 3106 - DNA, 16 bp, Artificial sequence
  Synthetic oligonucleotide
ctatgagtagctccag

SEQ ID NO: 3107 - DNA, 16 bp, Artificial sequence
  Synthetic oligonucleotide
ccgggaacttcagcca

SEQ ID NO: 3108 - DNA, 16 bp, Artificial sequence
  Synthetic oligonucleotide
aagcacaacttagcaa

SEQ ID NO: 3109 - DNA, 16 bp, Artificial sequence
  Synthetic oligonucleotide
aactcaatcaaagagg

SEQ ID NO: 3110 - DNA, 16 bp, Artificial sequence
  Synthetic oligonucleotide
aggcggagtcaaagtc

SEQ ID NO: 3111 - DNA, 16 bp, Artificial sequence
  Synthetic oligonucleotide
ttaccttaggtcacag

SEQ ID NO: 3112 - DNA, 16 bp, Artificial sequence
  Synthetic oligonucleotide
gcttacagagaggtat

SEQ ID NO: 3113 - DNA, 16 bp, Artificial sequence
  Synthetic oligonucleotide
gcattggaacaatggg

SEQ ID NO: 3114 - DNA, 16 bp, Artificial sequence
  Synthetic oligonucleotide
taaccttagcacctgc

SEQ ID NO: 3115 - DNA, 16 bp, Artificial sequence
  Synthetic oligonucleotide
ctgccttatagaggct

SEQ ID NO: 3116 - DNA, 16 bp, Artificial sequence
  Synthetic oligonucleotide
gccgcctgtggcttaa

SEQ ID NO: 3117 - DNA, 16 bp, Artificial sequence
  Synthetic oligonucleotide
aaattgtctggtgtcc

SEQ ID NO: 3118 - DNA, 16 bp, Artificial sequence
  Synthetic oligonucleotide
ataagttccccatcag

SEQ ID NO: 3119 - DNA, 16 bp, Artificial sequence
  Synthetic oligonucleotide
caaactcctcactggt

SEQ ID NO: 3120 - DNA, 16 bp, Artificial sequence
  Synthetic oligonucleotide
ctagaagtgaatggac

SEQ ID NO: 3121 - DNA, 16 bp, Artificial sequence
  Synthetic oligonucleotide
caattacatcctgaac

SEQ ID NO: 3122 - DNA, 16 bp, Artificial sequence
  Synthetic oligonucleotide
ttgcagtcatgaactg

SEQ ID NO: 3123 - DNA, 16 bp, Artificial sequence
  Synthetic oligonucleotide
gaattgctcttggaag

SEQ ID NO: 3124 - DNA, 16 bp, Artificial sequence
  Synthetic oligonucleotide
ctaaacaatgtggcct

SEQ ID NO: 3125 - DNA, 16 bp, Artificial sequence
  Synthetic oligonucleotide
tagtgggaagctcgag

SEQ ID NO: 3126 - DNA, 16 bp, Artificial sequence
  Synthetic oligonucleotide
cagatagcaaactatc

SEQ ID NO: 3127 - DNA, 16 bp, Artificial sequence
  Synthetic oligonucleotide
tccaaggtaagggtcc

SEQ ID NO: 3128 - DNA, 16 bp, Artificial sequence
  Synthetic oligonucleotide
taaggacattgattgt

SEQ ID NO: 3129 - DNA, 16 bp, Artificial sequence
  Synthetic oligonucleotide
tccatattgcaactgg

SEQ ID NO: 3130 - DNA, 16 bp, Artificial sequence
  Synthetic oligonucleotide
ctatcatcaaccacat

SEQ ID NO: 3131 - DNA, 16 bp, Artificial sequence
  Synthetic oligonucleotide
gacggctaatgggttg

SEQ ID NO: 3132 - DNA, 16 bp, Artificial sequence
  Synthetic oligonucleotide
cagacgggatgaaggc

SEQ ID NO: 3133 - DNA, 16 bp, Artificial sequence
  Synthetic oligonucleotide
cacttggttaggagag

SEQ ID NO: 3134 - DNA, 16 bp, Artificial sequence
  Synthetic oligonucleotide
ggaccttccttccaga

SEQ ID NO: 3135 - DNA, 16 bp, Artificial sequence
  Synthetic oligonucleotide
agacacatacctgata

SEQ ID NO: 3136 - DNA, 16 bp, Artificial sequence
  Synthetic oligonucleotide
tctgacaaccaactca

SEQ ID NO: 3137 - DNA, 16 bp, Artificial sequence
  Synthetic oligonucleotide
taacgagcctgtacaa

SEQ ID NO: 3138 - DNA, 16 bp, Artificial sequence
  Synthetic oligonucleotide
ttcggaattctgcact

SEQ ID NO: 3139 - DNA, 16 bp, Artificial sequence
  Synthetic oligonucleotide
aacaaccctaatctac

SEQ ID NO: 3140 - DNA, 16 bp, Artificial sequence
  Synthetic oligonucleotide
caacctaatgcaatca

SEQ ID NO: 3141 - DNA, 16 bp, Artificial sequence
  Synthetic oligonucleotide
gggtgtaagcagtaaa

SEQ ID NO: 3142 - DNA, 16 bp, Artificial sequence
  Synthetic oligonucleotide
atgagtgggtgccttt

SEQ ID NO: 3143 - DNA, 16 bp, Artificial sequence
  Synthetic oligonucleotide
gaggaggcctttgcat

SEQ ID NO: 3144 - DNA, 16 bp, Artificial sequence
  Synthetic oligonucleotide
tctagatgtaccaaga

SEQ ID NO: 3145 - DNA, 16 bp, Artificial sequence
  Synthetic oligonucleotide
atgaccgggactccct

SEQ ID NO: 3146 - DNA, 16 bp, Artificial sequence
  Synthetic oligonucleotide
aagcttaaccgtgata

SEQ ID NO: 3147 - DNA, 16 bp, Artificial sequence
  Synthetic oligonucleotide
aaggcagggctataaa

SEQ ID NO: 3148 - DNA, 16 bp, Artificial sequence
  Synthetic oligonucleotide
gaagtgggaatacgcc

SEQ ID NO: 3149 - DNA, 16 bp, Artificial sequence
  Synthetic oligonucleotide
gactgggaagccacgc

SEQ ID NO: 3150 - DNA, 16 bp, Artificial sequence
  Synthetic oligonucleotide
tctttccaagggtggt

SEQ ID NO: 3151 - DNA, 16 bp, Artificial sequence
  Synthetic oligonucleotide
atcttctggattaagg

SEQ ID NO: 3152 - DNA, 16 bp, Artificial sequence
  Synthetic oligonucleotide
acgcctggcttgggtg

SEQ ID NO: 3153 - DNA, 16 bp, Artificial sequence
  Synthetic oligonucleotide
ctttatatgcatggtc

SEQ ID NO: 3154 - DNA, 16 bp, Artificial sequence
  Synthetic oligonucleotide
ttactatagtagaagg

SEQ ID NO: 3155 - DNA, 16 bp, Artificial sequence
  Synthetic oligonucleotide
ggtttataatgcttca

SEQ ID NO: 3156 - DNA, 16 bp, Artificial sequence
  Synthetic oligonucleotide
cttacttaagccccta

SEQ ID NO: 3157 - DNA, 16 bp, Artificial sequence
  Synthetic oligonucleotide
ttgataaacaagtctg

SEQ ID NO: 3158 - DNA, 16 bp, Artificial sequence
  Synthetic oligonucleotide
gcaaatcttctgttcc

SEQ ID NO: 3159 - DNA, 16 bp, Artificial sequence
  Synthetic oligonucleotide
ggtattttagctagag

SEQ ID NO: 3160 - DNA, 16 bp, Artificial sequence
  Synthetic oligonucleotide
aaggtaagggtcccgt

SEQ ID NO: 3161 - DNA, 16 bp, Artificial sequence
  Synthetic oligonucleotide
ggataatatcagcaga

SEQ ID NO: 3162 - DNA, 16 bp, Artificial sequence
  Synthetic oligonucleotide
atagattacataagag

SEQ ID NO: 3163 - DNA, 16 bp, Artificial sequence
  Synthetic oligonucleotide
catagaggttcttctg

SEQ ID NO: 3164 - DNA, 16 bp, Artificial sequence
  Synthetic oligonucleotide
cttatgtacatgtgtc

SEQ ID NO: 3165 - DNA, 16 bp, Artificial sequence
  Synthetic oligonucleotide
agtattgaaatgttgt

SEQ ID NO: 3166 - DNA, 16 bp, Artificial sequence
  Synthetic oligonucleotide
ccaaatcataacaagg

SEQ ID NO: 3167 - DNA, 16 bp, Artificial sequence
  Synthetic oligonucleotide
catccataaagatcac

SEQ ID NO: 3168 - DNA, 16 bp, Artificial sequence
  Synthetic oligonucleotide
ccaaatgcaggattca

SEQ ID NO: 3169 - DNA, 16 bp, Artificial sequence
  Synthetic oligonucleotide
ttttactggacactgc

SEQ ID NO: 3170 - DNA, 16 bp, Artificial sequence
  Synthetic oligonucleotide
tccttttcatttgcgg

SEQ ID NO: 3171 - DNA, 16 bp, Artificial sequence
  Synthetic oligonucleotide
tcaacctttcagggaa

SEQ ID NO: 3172 - DNA, 16 bp, Artificial sequence
  Synthetic oligonucleotide
aggcgcgcccaactga

SEQ ID NO: 3173 - DNA, 16 bp, Artificial sequence
  Synthetic oligonucleotide
tgatctagcgggctcc

SEQ ID NO: 3174 - DNA, 16 bp, Artificial sequence
  Synthetic oligonucleotide
agacctagtgttgacc

SEQ ID NO: 3175 - DNA, 16 bp, Artificial sequence
  Synthetic oligonucleotide
gcctgcgctgcgcttt

SEQ ID NO: 3176 - DNA, 16 bp, Artificial sequence
  Synthetic oligonucleotide
gggtttgaattaagcc

SEQ ID NO: 3177 - DNA, 16 bp, Artificial sequence
  Synthetic oligonucleotide
ggaccgaagggagtag

SEQ ID NO: 3178 - DNA, 16 bp, Artificial sequence
  Synthetic oligonucleotide
ctggcggctccggaga

SEQ ID NO: 3179 - DNA, 16 bp, Artificial sequence
  Synthetic oligonucleotide
cagccgggcccgcctg

SEQ ID NO: 3180 - DNA, 16 bp, Artificial sequence
  Synthetic oligonucleotide
ctgaagttacttggct

SEQ ID NO: 3181 - DNA, 16 bp, Artificial sequence
  Synthetic oligonucleotide
ctcgggatcattcccc

SEQ ID NO: 3182 - DNA, 16 bp, Artificial sequence
  Synthetic oligonucleotide
cagcgagatcaccacc

SEQ ID NO: 3183 - DNA, 16 bp, Artificial sequence
  Synthetic oligonucleotide
ataccaccttcacagc

SEQ ID NO: 3184 - DNA, 16 bp, Artificial sequence
  Synthetic oligonucleotide
atactggatctatgag

SEQ ID NO: 3185 - DNA, 16 bp, Artificial sequence
  Synthetic oligonucleotide
tccggagtgctccggg

SEQ ID NO: 3186 - DNA, 16 bp, Artificial sequence
  Synthetic oligonucleotide
ttaagcacaacttagc

SEQ ID NO: 3187 - DNA, 16 bp, Artificial sequence
  Synthetic oligonucleotide
aaactcaatcaaagag

SEQ ID NO: 3188 - DNA, 16 bp, Artificial sequence
  Synthetic oligonucleotide
gcaggcggagtcaaag

SEQ ID NO: 3189 - DNA, 16 bp, Artificial sequence
  Synthetic oligonucleotide
cccttaccttaggtca

SEQ ID NO: 3190 - DNA, 16 bp, Artificial sequence
  Synthetic oligonucleotide
gtattccacaccaggc

SEQ ID NO: 3191 - DNA, 16 bp, Artificial sequence
  Synthetic oligonucleotide
caggcattggaacaat

SEQ ID NO: 3192 - DNA, 16 bp, Artificial sequence
  Synthetic oligonucleotide
actcttgtaaccttag

SEQ ID NO: 3193 - DNA, 16 bp, Artificial sequence
  Synthetic oligonucleotide
tctaccttgtacaatt

SEQ ID NO: 3194 - DNA, 16 bp, Artificial sequence
  Synthetic oligonucleotide
cccaagccgcctgtgg

SEQ ID NO: 3195 - DNA, 16 bp, Artificial sequence
  Synthetic oligonucleotide
cagaaggtctcccgtg

SEQ ID NO: 3196 - DNA, 16 bp, Artificial sequence
  Synthetic oligonucleotide
tgaaggtaataagttc

SEQ ID NO: 3197 - DNA, 16 bp, Artificial sequence
  Synthetic oligonucleotide
ggactatgaccacaaa

SEQ ID NO: 3198 - DNA, 16 bp, Artificial sequence
  Synthetic oligonucleotide
catcaggcatgaatga

SEQ ID NO: 3199 - DNA, 16 bp, Artificial sequence
  Synthetic oligonucleotide
ccctcgatgccacaat

SEQ ID NO: 3200 - DNA, 16 bp, Artificial sequence
  Synthetic oligonucleotide
attgcagtcatgaact

SEQ ID NO: 3201 - DNA, 16 bp, Artificial sequence
  Synthetic oligonucleotide
cccttgttggaaaact

SEQ ID NO: 3202 - DNA, 16 bp, Artificial sequence
  Synthetic oligonucleotide
gatcgccattttcctt

SEQ ID NO: 3203 - DNA, 16 bp, Artificial sequence
  Synthetic oligonucleotide
gatagtgggaagctcg

SEQ ID NO: 3204 - DNA, 16 bp, Artificial sequence
  Synthetic oligonucleotide
taagggtgctacagag

SEQ ID NO: 3205 - DNA, 16 bp, Artificial sequence
  Synthetic oligonucleotide
tttgatcctgtccaag

SEQ ID NO: 3206 - DNA, 16 bp, Artificial sequence
  Synthetic oligonucleotide
ctactatatcctggaa

SEQ ID NO: 3207 - DNA, 16 bp, Artificial sequence
  Synthetic oligonucleotide
ctaatccatattgcaa

SEQ ID NO: 3208 - DNA, 16 bp, Artificial sequence
  Synthetic oligonucleotide
tagtaagtctatcatc

SEQ ID NO: 3209 - DNA, 16 bp, Artificial sequence
  Synthetic oligonucleotide
aaaatgacggctaatg

SEQ ID NO: 3210 - DNA, 16 bp, Artificial sequence
  Synthetic oligonucleotide
accagacgggatgaag

SEQ ID NO: 3211 - DNA, 16 bp, Artificial sequence
  Synthetic oligonucleotide
agagacacttggttag

SEQ ID NO: 3212 - DNA, 16 bp, Artificial sequence
  Synthetic oligonucleotide
ctattggtggaagaca

SEQ ID NO: 3213 - DNA, 16 bp, Artificial sequence
  Synthetic oligonucleotide
tgggcattctgacaac

SEQ ID NO: 3214 - DNA, 16 bp, Artificial sequence
  Synthetic oligonucleotide
aataacgagcctgtac

SEQ ID NO: 3215 - DNA, 16 bp, Artificial sequence
  Synthetic oligonucleotide
cattcggaattctgca

SEQ ID NO: 3216 - DNA, 16 bp, Artificial sequence
  Synthetic oligonucleotide
ttaagttgtcacttgc

SEQ ID NO: 3217 - DNA, 16 bp, Artificial sequence
  Synthetic oligonucleotide
gccaacctaatgcaat

SEQ ID NO: 3218 - DNA, 16 bp, Artificial sequence
  Synthetic oligonucleotide
gctgggtgtaagcagt

SEQ ID NO: 3219 - DNA, 16 bp, Artificial sequence
  Synthetic oligonucleotide
gctatgatgttgggtt

SEQ ID NO: 3220 - DNA, 16 bp, Artificial sequence
  Synthetic oligonucleotide
catgatcagacgcacg

SEQ ID NO: 3221 - DNA, 16 bp, Artificial sequence
  Synthetic oligonucleotide
gctctagatgtaccaa

SEQ ID NO: 3222 - DNA, 16 bp, Artificial sequence
  Synthetic oligonucleotide
caatgaccgggactcc

SEQ ID NO: 3223 - DNA, 16 bp, Artificial sequence
  Synthetic oligonucleotide
tctaagcttaaccgtg

SEQ ID NO: 3224 - DNA, 16 bp, Artificial sequence
  Synthetic oligonucleotide
ctgacttatctaatga

SEQ ID NO: 3225 - DNA, 16 bp, Artificial sequence
  Synthetic oligonucleotide
ccacctacatctaacc

SEQ ID NO: 3226 - DNA, 16 bp, Artificial sequence
  Synthetic oligonucleotide
cagccgacagtatgac

SEQ ID NO: 3227 - DNA, 16 bp, Artificial sequence
  Synthetic oligonucleotide
acactacatggccagc

SEQ ID NO: 3228 - DNA, 16 bp, Artificial sequence
  Synthetic oligonucleotide
gatcttctggattaag

SEQ ID NO: 3229 - DNA, 16 bp, Artificial sequence
  Synthetic oligonucleotide
tacgcctggcttgggt

SEQ ID NO: 3230 - DNA, 16 bp, Artificial sequence
  Synthetic oligonucleotide
cgttatatgccaagca

SEQ ID NO: 3231 - DNA, 16 bp, Artificial sequence
  Synthetic oligonucleotide
tttactatagtagaag

SEQ ID NO: 3232 - DNA, 16 bp, Artificial sequence
  Synthetic oligonucleotide
tggtttataatgcttc

SEQ ID NO: 3233 - DNA, 16 bp, Artificial sequence
  Synthetic oligonucleotide
aagtattccacaccag

SEQ ID NO: 3234 - DNA, 16 bp, Artificial sequence
  Synthetic oligonucleotide
gccaaaatgacagtgt

SEQ ID NO: 3235 - DNA, 16 bp, Artificial sequence
  Synthetic oligonucleotide
aacattgaataccctt

SEQ ID NO: 3236 - DNA, 16 bp, Artificial sequence
  Synthetic oligonucleotide
caaaggcgatgaaggt

SEQ ID NO: 3237 - DNA, 16 bp, Artificial sequence
  Synthetic oligonucleotide
taagagtcaggattcc

SEQ ID NO: 3238 - DNA, 16 bp, Artificial sequence
  Synthetic oligonucleotide
atggataatatcagca

SEQ ID NO: 3239 - DNA, 16 bp, Artificial sequence
  Synthetic oligonucleotide
attatatgtgaatggg

SEQ ID NO: 3240 - DNA, 16 bp, Artificial sequence
  Synthetic oligonucleotide
acataaccttaatcaa

SEQ ID NO: 3241 - DNA, 16 bp, Artificial sequence
  Synthetic oligonucleotide
gttacttatgtacatg

SEQ ID NO: 3242 - DNA, 16 bp, Artificial sequence
  Synthetic oligonucleotide
gagtattgaaatgttg

SEQ ID NO: 3243 - DNA, 16 bp, Artificial sequence
  Synthetic oligonucleotide
tcagtaaaataacgag

SEQ ID NO: 3244 - DNA, 16 bp, Artificial sequence
  Synthetic oligonucleotide
ccatccataaagatca

SEQ ID NO: 3245 - DNA, 16 bp, Artificial sequence
  Synthetic oligonucleotide
cgttttagaatgatca

SEQ ID NO: 3246 - DNA, 16 bp, Artificial sequence
  Synthetic oligonucleotide
ctattataaatccagt

SEQ ID NO: 3247 - DNA, 16 bp, Artificial sequence
  Synthetic oligonucleotide
cagagtatatatccac

SEQ ID NO: 3248 - DNA, 16 bp, Artificial sequence
  Synthetic oligonucleotide
caaattgccaccacta

SEQ ID NO: 3249 - DNA, 16 bp, Artificial sequence
  Synthetic oligonucleotide
agaggcgcgcccaact

SEQ ID NO: 3250 - DNA, 16 bp, Artificial sequence
  Synthetic oligonucleotide
ggattgatctagcggg

SEQ ID NO: 3251 - DNA, 16 bp, Artificial sequence
  Synthetic oligonucleotide
gtggagacctagtgtt

SEQ ID NO: 3252 - DNA, 16 bp, Artificial sequence
  Synthetic oligonucleotide
cgcgcctgcgctgcgc

SEQ ID NO: 3253 - DNA, 16 bp, Artificial sequence
  Synthetic oligonucleotide
agagggtttgaattaa

SEQ ID NO: 3254 - DNA, 16 bp, Artificial sequence
  Synthetic oligonucleotide
cctggaccgaagggag

SEQ ID NO: 3255 - DNA, 16 bp, Artificial sequence
  Synthetic oligonucleotide
actctggcggctccgg

SEQ ID NO: 3256 - DNA, 16 bp, Artificial sequence
  Synthetic oligonucleotide
gccgcctgcaggacca

SEQ ID NO: 3257 - DNA, 16 bp, Artificial sequence
  Synthetic oligonucleotide
atcggctctgaagtta

SEQ ID NO: 3258 - DNA, 16 bp, Artificial sequence
  Synthetic oligonucleotide
catctcgggatcattc

SEQ ID NO: 3259 - DNA, 16 bp, Artificial sequence
  Synthetic oligonucleotide
cccagcgagatcacca

SEQ ID NO: 3260 - DNA, 16 bp, Artificial sequence
  Synthetic oligonucleotide
cataccaccttcacag

SEQ ID NO: 3261 - DNA, 16 bp, Artificial sequence
  Synthetic oligonucleotide
tatatactggatctat

SEQ ID NO: 3262 - DNA, 16 bp, Artificial sequence
  Synthetic oligonucleotide
ccatccggagtgctcc

SEQ ID NO: 3263 - DNA, 16 bp, Artificial sequence
  Synthetic oligonucleotide
tggtttaagcacaact

SEQ ID NO: 3264 - DNA, 16 bp, Artificial sequence
  Synthetic oligonucleotide
ttaaactcaatcaaag

SEQ ID NO: 3265 - DNA, 16 bp, Artificial sequence
  Synthetic oligonucleotide
aaggcaggcggagtca

SEQ ID NO: 3266 - DNA, 16 bp, Artificial sequence
  Synthetic oligonucleotide
ctacccttaccttagg

SEQ ID NO: 3267 - DNA, 16 bp, Artificial sequence
  Synthetic oligonucleotide
agagtatgattgggta

SEQ ID NO: 3268 - DNA, 16 bp, Artificial sequence
  Synthetic oligonucleotide
tgggcaacaggcattg

SEQ ID NO: 3269 - DNA, 16 bp, Artificial sequence
  Synthetic oligonucleotide
acataagctcttgttc

SEQ ID NO: 3270 - DNA, 16 bp, Artificial sequence
  Synthetic oligonucleotide
ataccgatgcatttct

SEQ ID NO: 3271 - DNA, 16 bp, Artificial sequence
  Synthetic oligonucleotide
ggctcccaagccgcct

SEQ ID NO: 3272 - DNA, 16 bp, Artificial sequence
  Synthetic oligonucleotide
tgcagaaggtctcccg

SEQ ID NO: 3273 - DNA, 16 bp, Artificial sequence
  Synthetic oligonucleotide
tgaatggatctcacta

SEQ ID NO: 3274 - DNA, 16 bp, Artificial sequence
  Synthetic oligonucleotide
cagtctggactatgac

SEQ ID NO: 3275 - DNA, 16 bp, Artificial sequence
  Synthetic oligonucleotide
gccaagcaacttgata

SEQ ID NO: 3276 - DNA, 16 bp, Artificial sequence
  Synthetic oligonucleotide
gatccctcgatgccac

SEQ ID NO: 3277 - DNA, 16 bp, Artificial sequence
  Synthetic oligonucleotide
caattgcagtcatgaa

SEQ ID NO: 3278 - DNA, 16 bp, Artificial sequence
  Synthetic oligonucleotide
tatacccttgttggaa

SEQ ID NO: 3279 - DNA, 16 bp, Artificial sequence
  Synthetic oligonucleotide
cagatcgccattttcc

SEQ ID NO: 3280 - DNA, 16 bp, Artificial sequence
  Synthetic oligonucleotide
ctcccccagcagatag

SEQ ID NO: 3281 - DNA, 16 bp, Artificial sequence
  Synthetic oligonucleotide
gcataagggtgctaca

SEQ ID NO: 3282 - DNA, 16 bp, Artificial sequence
  Synthetic oligonucleotide
ggctttgatcctgtcc

SEQ ID NO: 3283 - DNA, 16 bp, Artificial sequence
  Synthetic oligonucleotide
tatctactatatcctg

SEQ ID NO: 3284 - DNA, 16 bp, Artificial sequence
  Synthetic oligonucleotide
gtcctaatccatattg

SEQ ID NO: 3285 - DNA, 16 bp, Artificial sequence
  Synthetic oligonucleotide
tttcaaccataagcac

SEQ ID NO: 3286 - DNA, 16 bp, Artificial sequence
  Synthetic oligonucleotide
cattcaagcacaacat

SEQ ID NO: 3287 - DNA, 16 bp, Artificial sequence
  Synthetic oligonucleotide
aaccaccagacgggat

SEQ ID NO: 3288 - DNA, 16 bp, Artificial sequence
  Synthetic oligonucleotide
acttaccagcaagaat

SEQ ID NO: 3289 - DNA, 16 bp, Artificial sequence
  Synthetic oligonucleotide
ctacctattggtggaa

SEQ ID NO: 3290 - DNA, 16 bp, Artificial sequence
  Synthetic oligonucleotide
tggtaccatgggcatt

SEQ ID NO: 3291 - DNA, 16 bp, Artificial sequence
  Synthetic oligonucleotide
ctctggtgggctcaaa

SEQ ID NO: 3292 - DNA, 16 bp, Artificial sequence
  Synthetic oligonucleotide
cttttacattcggaat

SEQ ID NO: 3293 - DNA, 16 bp, Artificial sequence
  Synthetic oligonucleotide
gatgttaagttgtcac

SEQ ID NO: 3294 - DNA, 16 bp, Artificial sequence
  Synthetic oligonucleotide
aaaggacctcaggtga

SEQ ID NO: 3295 - DNA, 16 bp, Artificial sequence
  Synthetic oligonucleotide
cctctatgtgccccac

SEQ ID NO: 3296 - DNA, 16 bp, Artificial sequence
  Synthetic oligonucleotide
ggaaggtgcagctatg

SEQ ID NO: 3297 - DNA, 16 bp, Artificial sequence
  Synthetic oligonucleotide
catgttaaggaagctg

SEQ ID NO: 3298 - DNA, 16 bp, Artificial sequence
  Synthetic oligonucleotide
catgcgggccctgttc

SEQ ID NO: 3299 - DNA, 16 bp, Artificial sequence
  Synthetic oligonucleotide
ttggcaatgaccggga

SEQ ID NO: 3300 - DNA, 16 bp, Artificial sequence
  Synthetic oligonucleotide
gactctaagcttaacc

SEQ ID NO: 3301 - DNA, 16 bp, Artificial sequence
  Synthetic oligonucleotide
ctgaagttgtctcttg

SEQ ID NO: 3302 - DNA, 16 bp, Artificial sequence
  Synthetic oligonucleotide
cccggccacctacatc

SEQ ID NO: 3303 - DNA, 16 bp, Artificial sequence
  Synthetic oligonucleotide
atgcagccgacagtat

SEQ ID NO: 3304 - DNA, 16 bp, Artificial sequence
  Synthetic oligonucleotide
cttaatacctgagggt

SEQ ID NO: 3305 - DNA, 16 bp, Artificial sequence
  Synthetic oligonucleotide
cgatcttctggattaa

SEQ ID NO: 3306 - DNA, 16 bp, Artificial sequence
  Synthetic oligonucleotide
atacgcctggcttggg

SEQ ID NO: 3307 - DNA, 16 bp, Artificial sequence
  Synthetic oligonucleotide
cccgttatatgccaag

SEQ ID NO: 3308 - DNA, 16 bp, Artificial sequence
  Synthetic oligonucleotide
atgtttactatagtag

SEQ ID NO: 3309 - DNA, 16 bp, Artificial sequence
  Synthetic oligonucleotide
ctatttgtactgtggt

SEQ ID NO: 3310 - DNA, 16 bp, Artificial sequence
  Synthetic oligonucleotide
gaaataactgggactt

SEQ ID NO: 3311 - DNA, 16 bp, Artificial sequence
  Synthetic oligonucleotide
gaaattgtctggtgtc

SEQ ID NO: 3312 - DNA, 16 bp, Artificial sequence
  Synthetic oligonucleotide
caagtaactgtattca

SEQ ID NO: 3313 - DNA, 16 bp, Artificial sequence
  Synthetic oligonucleotide
acaactatgtgccagc

SEQ ID NO: 3314 - DNA, 16 bp, Artificial sequence
  Synthetic oligonucleotide
gacttactaagagtca

SEQ ID NO: 3315 - DNA, 16 bp, Artificial sequence
  Synthetic oligonucleotide
aatggataatatcagc

SEQ ID NO: 3316 - DNA, 16 bp, Artificial sequence
  Synthetic oligonucleotide
gatagtaagtctatca

SEQ ID NO: 3317 - DNA, 16 bp, Artificial sequence
  Synthetic oligonucleotide
tacataaccttaatca

SEQ ID NO: 3318 - DNA, 16 bp, Artificial sequence
  Synthetic oligonucleotide
gaatttggaagattcc

SEQ ID NO: 3319 - DNA, 16 bp, Artificial sequence
  Synthetic oligonucleotide
aaccatgagtattgaa

SEQ ID NO: 3320 - DNA, 16 bp, Artificial sequence
  Synthetic oligonucleotide
gctcaaattattcatc

SEQ ID NO: 3321 - DNA, 16 bp, Artificial sequence
  Synthetic oligonucleotide
gaaagctgatgtgtgc

SEQ ID NO: 3322 - DNA, 16 bp, Artificial sequence
  Synthetic oligonucleotide
ggaatttcgagagagg

SEQ ID NO: 3323 - DNA, 16 bp, Artificial sequence
  Synthetic oligonucleotide
ctggatatgcaggtgg

SEQ ID NO: 3324 - DNA, 16 bp, Artificial sequence
  Synthetic oligonucleotide
gccagagtatatatcc

SEQ ID NO: 3325 - DNA, 16 bp, Artificial sequence
  Synthetic oligonucleotide
ataagggcccagtgcc

SEQ ID NO: 3326 - DNA, 16 bp, Artificial sequence
  Synthetic oligonucleotide
ctcggcttggcagagg

SEQ ID NO: 3327 - DNA, 16 bp, Artificial sequence
  Synthetic oligonucleotide
gcttcctaggattggc

SEQ ID NO: 3328 - DNA, 16 bp, Artificial sequence
  Synthetic oligonucleotide
ccccgtggagacctag

SEQ ID NO: 3329 - DNA, 16 bp, Artificial sequence
  Synthetic oligonucleotide
agccccgcgcctgcgc

SEQ ID NO: 3330 - DNA, 16 bp, Artificial sequence
  Synthetic oligonucleotide
agtacccaatcccagg

SEQ ID NO: 3331 - DNA, 16 bp, Artificial sequence
  Synthetic oligonucleotide
agcctggaccgaaggg

SEQ ID NO: 3332 - DNA, 16 bp, Artificial sequence
  Synthetic oligonucleotide
cgcgcagactctggcg

SEQ ID NO: 3333 - DNA, 16 bp, Artificial sequence
  Synthetic oligonucleotide
gccgcctgccgccgag

SEQ ID NO: 3334 - DNA, 16 bp, Artificial sequence
  Synthetic oligonucleotide
agatcggctctgaagt

SEQ ID NO: 3335 - DNA, 16 bp, Artificial sequence
  Synthetic oligonucleotide
gcattcaagccttctc

SEQ ID NO: 3336 - DNA, 16 bp, Artificial sequence
  Synthetic oligonucleotide
gagtgaatcacaatga

SEQ ID NO: 3337 - DNA, 16 bp, Artificial sequence
  Synthetic oligonucleotide
atcataccaccttcac

SEQ ID NO: 3338 - DNA, 16 bp, Artificial sequence
  Synthetic oligonucleotide
gtgtagcatcttgaac

SEQ ID NO: 3339 - DNA, 16 bp, Artificial sequence
  Synthetic oligonucleotide
gactcccatccggagt

SEQ ID NO: 3340 - DNA, 16 bp, Artificial sequence
  Synthetic oligonucleotide
aacggcagaagacacc

SEQ ID NO: 3341 - DNA, 16 bp, Artificial sequence
  Synthetic oligonucleotide
cagccacaattgttaa

SEQ ID NO: 3342 - DNA, 16 bp, Artificial sequence
  Synthetic oligonucleotide
cacacgaggcagataa

SEQ ID NO: 3343 - DNA, 16 bp, Artificial sequence
  Synthetic oligonucleotide
ttctacccttacctta

SEQ ID NO: 3344 - DNA, 16 bp, Artificial sequence
  Synthetic oligonucleotide
actgagctattgcaaa

SEQ ID NO: 3345 - DNA, 16 bp, Artificial sequence
  Synthetic oligonucleotide
ctgacaaacgaggaag

SEQ ID NO: 3346 - DNA, 16 bp, Artificial sequence
  Synthetic oligonucleotide
gactggtttgtccagt

SEQ ID NO: 3347 - DNA, 16 bp, Artificial sequence
  Synthetic oligonucleotide
tcccgtcacccaaaat

SEQ ID NO: 3348 - DNA, 16 bp, Artificial sequence
  Synthetic oligonucleotide
cttctagctcttgggc

SEQ ID NO: 3349 - DNA, 16 bp, Artificial sequence
  Synthetic oligonucleotide
gagggagccacgaaga

SEQ ID NO: 3350 - DNA, 16 bp, Artificial sequence
  Synthetic oligonucleotide
tcaatagagttgaaga

SEQ ID NO: 3351 - DNA, 16 bp, Artificial sequence
  Synthetic oligonucleotide
gctaagccaccagcta

SEQ ID NO: 3352 - DNA, 16 bp, Artificial sequence
  Synthetic oligonucleotide
ctgtttgaagagtcat

SEQ ID NO: 3353 - DNA, 16 bp, Artificial sequence
  Synthetic oligonucleotide
taggatccctcgatgc

SEQ ID NO: 3354 - DNA, 16 bp, Artificial sequence
  Synthetic oligonucleotide
gttgcaattgcagtca

SEQ ID NO: 3355 - DNA, 16 bp, Artificial sequence
  Synthetic oligonucleotide
gttactggataatagt

SEQ ID NO: 3356 - DNA, 16 bp, Artificial sequence
  Synthetic oligonucleotide
cacagatcgccatttt

SEQ ID NO: 3357 - DNA, 16 bp, Artificial sequence
  Synthetic oligonucleotide
acctagctcccccagc

SEQ ID NO: 3358 - DNA, 16 bp, Artificial sequence
  Synthetic oligonucleotide
ccagcataagggtgct

SEQ ID NO: 3359 - DNA, 16 bp, Artificial sequence
  Synthetic oligonucleotide
gacagggctttgatcc

SEQ ID NO: 3360 - DNA, 16 bp, Artificial sequence
  Synthetic oligonucleotide
ttgtaacacctctagc

SEQ ID NO: 3361 - DNA, 16 bp, Artificial sequence
  Synthetic oligonucleotide
ctgtcctaatccatat

SEQ ID NO: 3362 - DNA, 16 bp, Artificial sequence
  Synthetic oligonucleotide
tctgatgatccagaga

SEQ ID NO: 3363 - DNA, 16 bp, Artificial sequence
  Synthetic oligonucleotide
tagtctagcactcttc

SEQ ID NO: 3364 - DNA, 16 bp, Artificial sequence
  Synthetic oligonucleotide
gccaaccaccagacgg

SEQ ID NO: 3365 - DNA, 16 bp, Artificial sequence
  Synthetic oligonucleotide
caacttaccagcaaga

SEQ ID NO: 3366 - DNA, 16 bp, Artificial sequence
  Synthetic oligonucleotide
tcactacctattggtg

SEQ ID NO: 3367 - DNA, 16 bp, Artificial sequence
  Synthetic oligonucleotide
gaaatggtaccatggg

SEQ ID NO: 3368 - DNA, 16 bp, Artificial sequence
  Synthetic oligonucleotide
ttatcctctggtgggc

SEQ ID NO: 3369 - DNA, 16 bp, Artificial sequence
  Synthetic oligonucleotide
tgcgcttttacattcg

SEQ ID NO: 3370 - DNA, 16 bp, Artificial sequence
  Synthetic oligonucleotide
tccttgatgttaagtt

SEQ ID NO: 3371 - DNA, 16 bp, Artificial sequence
  Synthetic oligonucleotide
cccgcccactgtcttt

SEQ ID NO: 3372 - DNA, 16 bp, Artificial sequence
  Synthetic oligonucleotide
tccaaccaataatagt

SEQ ID NO: 3373 - DNA, 16 bp, Artificial sequence
  Synthetic oligonucleotide
gaaagggatgtcagtg

SEQ ID NO: 3374 - DNA, 16 bp, Artificial sequence
  Synthetic oligonucleotide
gccttacatgacatgt

SEQ ID NO: 3375 - DNA, 16 bp, Artificial sequence
  Synthetic oligonucleotide
cctattgcatgcgggc

SEQ ID NO: 3376 - DNA, 16 bp, Artificial sequence
  Synthetic oligonucleotide
tctttggcaatgaccg

SEQ ID NO: 3377 - DNA, 16 bp, Artificial sequence
  Synthetic oligonucleotide
gtgaatgactctaagc

SEQ ID NO: 3378 - DNA, 16 bp, Artificial sequence
  Synthetic oligonucleotide
tactgaagttgtctct

SEQ ID NO: 3379 - DNA, 16 bp, Artificial sequence
  Synthetic oligonucleotide
cgcccggccacctaca

SEQ ID NO: 3380 - DNA, 16 bp, Artificial sequence
  Synthetic oligonucleotide
taaggatgcagccgac

SEQ ID NO: 3381 - DNA, 16 bp, Artificial sequence
  Synthetic oligonucleotide
gccttaatacctgagg

SEQ ID NO: 3382 - DNA, 16 bp, Artificial sequence
  Synthetic oligonucleotide
acgatcttctggatta

SEQ ID NO: 3383 - DNA, 16 bp, Artificial sequence
  Synthetic oligonucleotide
gatacgcctggcttgg

SEQ ID NO: 3384 - DNA, 16 bp, Artificial sequence
  Synthetic oligonucleotide
gatatcacacactcca

SEQ ID NO: 3385 - DNA, 16 bp, Artificial sequence
  Synthetic oligonucleotide
tgcccgttatatgcca

SEQ ID NO: 3386 - DNA, 16 bp, Artificial sequence
  Synthetic oligonucleotide
gatgtttactatagta

SEQ ID NO: 3387 - DNA, 16 bp, Artificial sequence
  Synthetic oligonucleotide
ctccaataggactggg

SEQ ID NO: 3388 - DNA, 16 bp, Artificial sequence
  Synthetic oligonucleotide
cttacttatacctgga

SEQ ID NO: 3389 - DNA, 16 bp, Artificial sequence
  Synthetic oligonucleotide
caaggaaattgtctgg

SEQ ID NO: 3390 - DNA, 16 bp, Artificial sequence
  Synthetic oligonucleotide
cctaatttgttacagg

SEQ ID NO: 3391 - DNA, 16 bp, Artificial sequence
  Synthetic oligonucleotide
gaaatagctgagtctc

SEQ ID NO: 3392 - DNA, 16 bp, Artificial sequence
  Synthetic oligonucleotide
aagaagagtttggtca

SEQ ID NO: 3393 - DNA, 16 bp, Artificial sequence
  Synthetic oligonucleotide
ccaataggcaaaattc

SEQ ID NO: 3394 - DNA, 16 bp, Artificial sequence
  Synthetic oligonucleotide
aagatagtaagtctat

SEQ ID NO: 3395 - DNA, 16 bp, Artificial sequence
  Synthetic oligonucleotide
aatgacggctaatggg

SEQ ID NO: 3396 - DNA, 16 bp, Artificial sequence
  Synthetic oligonucleotide
taaactaatcattccg

SEQ ID NO: 3397 - DNA, 16 bp, Artificial sequence
  Synthetic oligonucleotide
gcaaagcactgtctgg

SEQ ID NO: 3398 - DNA, 16 bp, Artificial sequence
  Synthetic oligonucleotide
tgtaacactcaaccgt

SEQ ID NO: 3399 - DNA, 16 bp, Artificial sequence
  Synthetic oligonucleotide
caaacctacagtcagc

SEQ ID NO: 3400 - DNA, 16 bp, Artificial sequence
  Synthetic oligonucleotide
ttcgatggaatttcga

SEQ ID NO: 3401 - DNA, 16 bp, Artificial sequence
  Synthetic oligonucleotide
aaaggattaagctcca

SEQ ID NO: 3402 - DNA, 16 bp, Artificial sequence
  Synthetic oligonucleotide
ctcagatggcccccca

SEQ ID NO: 3403 - DNA, 16 bp, Artificial sequence
  Synthetic oligonucleotide
taaaggtttatggtgg

SEQ ID NO: 3404 - DNA, 16 bp, Artificial sequence
  Synthetic oligonucleotide
gtctcggcttggcaga

SEQ ID NO: 3405 - DNA, 16 bp, Artificial sequence
  Synthetic oligonucleotide
cctacgaagcatgcca

SEQ ID NO: 3406 - DNA, 16 bp, Artificial sequence
  Synthetic oligonucleotide
ctggccccgtggagac

SEQ ID NO: 3407 - DNA, 16 bp, Artificial sequence
  Synthetic oligonucleotide
ccaaagccccgcgcct

SEQ ID NO: 3408 - DNA, 16 bp, Artificial sequence
  Synthetic oligonucleotide
gaaagtacccaatccc

SEQ ID NO: 3409 - DNA, 16 bp, Artificial sequence
  Synthetic oligonucleotide
caggagcctggaccga

SEQ ID NO: 3410 - DNA, 16 bp, Artificial sequence
  Synthetic oligonucleotide
cctcgcgcagactctg

SEQ ID NO: 3411 - DNA, 16 bp, Artificial sequence
  Synthetic oligonucleotide
tcgcgccgcctgccgc

SEQ ID NO: 3412 - DNA, 16 bp, Artificial sequence
  Synthetic oligonucleotide
ggaccctagatcggct

SEQ ID NO: 3413 - DNA, 16 bp, Artificial sequence
  Synthetic oligonucleotide
ccttagacacctgcat

SEQ ID NO: 3414 - DNA, 16 bp, Artificial sequence
  Synthetic oligonucleotide
tagagtgaatcacaat

SEQ ID NO: 3415 - DNA, 16 bp, Artificial sequence
  Synthetic oligonucleotide
tagctatcataccacc

SEQ ID NO: 3416 - DNA, 16 bp, Artificial sequence
  Synthetic oligonucleotide
ggatctaaactggttt

SEQ ID NO: 3417 - DNA, 16 bp, Artificial sequence
  Synthetic oligonucleotide
ggagactcccatccgg

SEQ ID NO: 3418 - DNA, 16 bp, Artificial sequence
  Synthetic oligonucleotide
tatttccaacggcaga

SEQ ID NO: 3419 - DNA, 16 bp, Artificial sequence
  Synthetic oligonucleotide
gcagccacaattgtta

SEQ ID NO: 3420 - DNA, 16 bp, Artificial sequence
  Synthetic oligonucleotide
ctaagcctctcttacc

SEQ ID NO: 3421 - DNA, 16 bp, Artificial sequence
  Synthetic oligonucleotide
cactagccaaccagtc

SEQ ID NO: 3422 - DNA, 16 bp, Artificial sequence
  Synthetic oligonucleotide
catagggcccaactga

SEQ ID NO: 3423 - DNA, 16 bp, Artificial sequence
  Synthetic oligonucleotide
caggcaaactagttag

SEQ ID NO: 3424 - DNA, 16 bp, Artificial sequence
  Synthetic oligonucleotide
gtttactgactggttt

SEQ ID NO: 3425 - DNA, 16 bp, Artificial sequence
  Synthetic oligonucleotide
taagaatcccgtcacc

SEQ ID NO: 3426 - DNA, 16 bp, Artificial sequence
  Synthetic oligonucleotide
cccttctagctcttgg

SEQ ID NO: 3427 - DNA, 16 bp, Artificial sequence
  Synthetic oligonucleotide
ctgagggagccacgaa

SEQ ID NO: 3428 - DNA, 16 bp, Artificial sequence
  Synthetic oligonucleotide
caggctcaatagagtt

SEQ ID NO: 3429 - DNA, 16 bp, Artificial sequence
  Synthetic oligonucleotide
tagctaagccaccagc

SEQ ID NO: 3430 - DNA, 16 bp, Artificial sequence
  Synthetic oligonucleotide
gaagaggccctgctta

SEQ ID NO: 3431 - DNA, 16 bp, Artificial sequence
  Synthetic oligonucleotide
tttaggatccctcgat

SEQ ID NO: 3432 - DNA, 16 bp, Artificial sequence
  Synthetic oligonucleotide
agttgcaattgcagtc

SEQ ID NO: 3433 - DNA, 16 bp, Artificial sequence
  Synthetic oligonucleotide
ctgaggttactggata

SEQ ID NO: 3434 - DNA, 16 bp, Artificial sequence
  Synthetic oligonucleotide
ccaacccacaaccatc

SEQ ID NO: 3435 - DNA, 16 bp, Artificial sequence
  Synthetic oligonucleotide
tctgacatgggccgtg

SEQ ID NO: 3436 - DNA, 16 bp, Artificial sequence
  Synthetic oligonucleotide
gtatcaattcatatct

SEQ ID NO: 3437 - DNA, 16 bp, Artificial sequence
  Synthetic oligonucleotide
tagctacctgcagaca

SEQ ID NO: 3438 - DNA, 16 bp, Artificial sequence
  Synthetic oligonucleotide
gatacatcaacaagtt

SEQ ID NO: 3439 - DNA, 16 bp, Artificial sequence
  Synthetic oligonucleotide
ttagaggatcaaggac

SEQ ID NO: 3440 - DNA, 16 bp, Artificial sequence
  Synthetic oligonucleotide
tctagtctagcactct

SEQ ID NO: 3441 - DNA, 16 bp, Artificial sequence
  Synthetic oligonucleotide
atcgccaaccaccaga

SEQ ID NO: 3442 - DNA, 16 bp, Artificial sequence
  Synthetic oligonucleotide
ctttaccatccacaac

SEQ ID NO: 3443 - DNA, 16 bp, Artificial sequence
  Synthetic oligonucleotide
cccagtagaatctagg

SEQ ID NO: 3444 - DNA, 16 bp, Artificial sequence
  Synthetic oligonucleotide
tggtgaaatggtacca

SEQ ID NO: 3445 - DNA, 16 bp, Artificial sequence
  Synthetic oligonucleotide
atttatcctctggtgg

SEQ ID NO: 3446 - DNA, 16 bp, Artificial sequence
  Synthetic oligonucleotide
caaagtcatgcgcttt

SEQ ID NO: 3447 - DNA, 16 bp, Artificial sequence
  Synthetic oligonucleotide
ctacttccttgatgtt

SEQ ID NO: 3448 - DNA, 16 bp, Artificial sequence
  Synthetic oligonucleotide
cgccccgcccactgtc

SEQ ID NO: 3449 - DNA, 16 bp, Artificial sequence
  Synthetic oligonucleotide
gagtttgattctgccg

SEQ ID NO: 3450 - DNA, 16 bp, Artificial sequence
  Synthetic oligonucleotide
cctcgcaaaagcactt

SEQ ID NO: 3451 - DNA, 16 bp, Artificial sequence
  Synthetic oligonucleotide
agggccttacatgaca

SEQ ID NO: 3452 - DNA, 16 bp, Artificial sequence
  Synthetic oligonucleotide
tgcctattgcatgcgg

SEQ ID NO: 3453 - DNA, 16 bp, Artificial sequence
  Synthetic oligonucleotide
gctctttggcaatgac

SEQ ID NO: 3454 - DNA, 16 bp, Artificial sequence
  Synthetic oligonucleotide
cagcttaatgtgtatg

SEQ ID NO: 3455 - DNA, 16 bp, Artificial sequence
  Synthetic oligonucleotide
aatactgaagttgtct

SEQ ID NO: 3456 - DNA, 16 bp, Artificial sequence
  Synthetic oligonucleotide
caccgcccggccacct

SEQ ID NO: 3457 - DNA, 16 bp, Artificial sequence
  Synthetic oligonucleotide
ctatgggcactgccaa

SEQ ID NO: 3458 - DNA, 16 bp, Artificial sequence
  Synthetic oligonucleotide
aggccttaatacctga

SEQ ID NO: 3459 - DNA, 16 bp, Artificial sequence
  Synthetic oligonucleotide
tacgatcttctggatt

SEQ ID NO: 3460 - DNA, 16 bp, Artificial sequence
  Synthetic oligonucleotide
aggcagttgcaattgc

SEQ ID NO: 3461 - DNA, 16 bp, Artificial sequence
  Synthetic oligonucleotide
ttgatacgcctggctt

SEQ ID NO: 3462 - DNA, 16 bp, Artificial sequence
  Synthetic oligonucleotide
catttacagtgcccgt

SEQ ID NO: 3463 - DNA, 16 bp, Artificial sequence
  Synthetic oligonucleotide
agaaacgattatgtgc

SEQ ID NO: 3464 - DNA, 16 bp, Artificial sequence
  Synthetic oligonucleotide
actccaataggactgg

SEQ ID NO: 3465 - DNA, 16 bp, Artificial sequence
  Synthetic oligonucleotide
agtgatataattaggt

SEQ ID NO: 3466 - DNA, 16 bp, Artificial sequence
  Synthetic oligonucleotide
tctaaaatctggccaa

SEQ ID NO: 3467 - DNA, 16 bp, Artificial sequence
  Synthetic oligonucleotide
tacctaatttgttaca

SEQ ID NO: 3468 - DNA, 16 bp, Artificial sequence
  Synthetic oligonucleotide
ttattaacacctccca

SEQ ID NO: 3469 - DNA, 16 bp, Artificial sequence
  Synthetic oligonucleotide
gaagaagagtttggtc

SEQ ID NO: 3470 - DNA, 16 bp, Artificial sequence
  Synthetic oligonucleotide
caccaattttcatcca

SEQ ID NO: 3471 - DNA, 16 bp, Artificial sequence
  Synthetic oligonucleotide
ttaagatagtaagtct

SEQ ID NO: 3472 - DNA, 16 bp, Artificial sequence
  Synthetic oligonucleotide
agtaagaaaatgacgg

SEQ ID NO: 3473 - DNA, 16 bp, Artificial sequence
  Synthetic oligonucleotide
actaaactaatcattc

SEQ ID NO: 3474 - DNA, 16 bp, Artificial sequence
  Synthetic oligonucleotide
agtagcaaagcactgt

SEQ ID NO: 3475 - DNA, 16 bp, Artificial sequence
  Synthetic oligonucleotide
aagaagtacctcacta

SEQ ID NO: 3476 - DNA, 16 bp, Artificial sequence
  Synthetic oligonucleotide
gtaatctagagcaagg

SEQ ID NO: 3477 - DNA, 16 bp, Artificial sequence
  Synthetic oligonucleotide
gttcgatggaatttcg

SEQ ID NO: 3478 - DNA, 16 bp, Artificial sequence
  Synthetic oligonucleotide
attattggagtcacgc

SEQ ID NO: 3479 - DNA, 16 bp, Artificial sequence
  Synthetic oligonucleotide
gcatctagattccttt

SEQ ID NO: 3480 - DNA, 16 bp, Artificial sequence
  Synthetic oligonucleotide
ctaatcaccctgctta

SEQ ID NO: 3481 - DNA, 16 bp, Artificial sequence
  Synthetic oligonucleotide
gcccccttcagtctcg

SEQ ID NO: 3482 - DNA, 16 bp, Artificial sequence
  Synthetic oligonucleotide
gcacctacgaagcatg

SEQ ID NO: 3483 - DNA, 16 bp, Artificial sequence
  Synthetic oligonucleotide
gcggctgagctttctc

SEQ ID NO: 3484 - DNA, 16 bp, Artificial sequence
  Synthetic oligonucleotide
ggccaaagccccgcgc

SEQ ID NO: 3485 - DNA, 16 bp, Artificial sequence
  Synthetic oligonucleotide
ttggaaagtacccaat

SEQ ID NO: 3486 - DNA, 16 bp, Artificial sequence
  Synthetic oligonucleotide
gtgcggtgggacagga

SEQ ID NO: 3487 - DNA, 16 bp, Artificial sequence
  Synthetic oligonucleotide
agcctcgcgcagactc

SEQ ID NO: 3488 - DNA, 16 bp, Artificial sequence
  Synthetic oligonucleotide
cttcgcgccgcctgcc

SEQ ID NO: 3489 - DNA, 16 bp, Artificial sequence
  Synthetic oligonucleotide
caacgaggctgcatca

SEQ ID NO: 3490 - DNA, 16 bp, Artificial sequence
  Synthetic oligonucleotide
aaccttagacacctgc

SEQ ID NO: 3491 - DNA, 16 bp, Artificial sequence
  Synthetic oligonucleotide
taggtagagtgaatca

SEQ ID NO: 3492 - DNA, 16 bp, Artificial sequence
  Synthetic oligonucleotide
cttagctatcatacca

SEQ ID NO: 3493 - DNA, 16 bp, Artificial sequence
  Synthetic oligonucleotide
ctggatctaaactggt

SEQ ID NO: 3494 - DNA, 16 bp, Artificial sequence
  Synthetic oligonucleotide
tacggagactcccatc

SEQ ID NO: 3495 - DNA, 16 bp, Artificial sequence
  Synthetic oligonucleotide
cagctatttccaacgg

SEQ ID NO: 3496 - DNA, 16 bp, Artificial sequence
  Synthetic oligonucleotide
tgcagccacaattgtt

SEQ ID NO: 3497 - DNA, 16 bp, Artificial sequence
  Synthetic oligonucleotide
tatccccacactaagc

SEQ ID NO: 3498 - DNA, 16 bp, Artificial sequence
  Synthetic oligonucleotide
accagaacactagcca

SEQ ID NO: 3499 - DNA, 16 bp, Artificial sequence
  Synthetic oligonucleotide
cttatggaactgcata

SEQ ID NO: 3500 - DNA, 16 bp, Artificial sequence
  Synthetic oligonucleotide
cctggattccatatga

SEQ ID NO: 3501 - DNA, 16 bp, Artificial sequence
  Synthetic oligonucleotide
atgtttactgactggt

SEQ ID NO: 3502 - DNA, 16 bp, Artificial sequence
  Synthetic oligonucleotide
gataagaatcccgtca

SEQ ID NO: 3503 - DNA, 16 bp, Artificial sequence
  Synthetic oligonucleotide
gctgatgaagaccagc

SEQ ID NO: 3504 - DNA, 16 bp, Artificial sequence
  Synthetic oligonucleotide
tagagattatgggttg

SEQ ID NO: 3505 - DNA, 16 bp, Artificial sequence
  Synthetic oligonucleotide
taggacaggctcaata

SEQ ID NO: 3506 - DNA, 16 bp, Artificial sequence
  Synthetic oligonucleotide
ctccctagctaagcca

SEQ ID NO: 3507 - DNA, 16 bp, Artificial sequence
  Synthetic oligonucleotide
agcggcttcccttatt

SEQ ID NO: 3508 - DNA, 16 bp, Artificial sequence
  Synthetic oligonucleotide
ctccttttaggatccc

SEQ ID NO: 3509 - DNA, 16 bp, Artificial sequence
  Synthetic oligonucleotide
ataacacgcagccact

SEQ ID NO: 3510 - DNA, 16 bp, Artificial sequence
  Synthetic oligonucleotide
ccacgcccaaacctcc

SEQ ID NO: 3511 - DNA, 16 bp, Artificial sequence
  Synthetic oligonucleotide
tataagagctgctgac

SEQ ID NO: 3512 - DNA, 16 bp, Artificial sequence
  Synthetic oligonucleotide
actttggtatcaattc

SEQ ID NO: 3513 - DNA, 16 bp, Artificial sequence
  Synthetic oligonucleotide
cagcgcagtaagagac

SEQ ID NO: 3514 - DNA, 16 bp, Artificial sequence
  Synthetic oligonucleotide
gatagctacctgcaga

SEQ ID NO: 3515 - DNA, 16 bp, Artificial sequence
  Synthetic oligonucleotide
gaactacactttcaac

SEQ ID NO: 3516 - DNA, 16 bp, Artificial sequence
  Synthetic oligonucleotide
tttctcgaatcaaatc

SEQ ID NO: 3517 - DNA, 16 bp, Artificial sequence
  Synthetic oligonucleotide
gattctagtctagcac

SEQ ID NO: 3518 - DNA, 16 bp, Artificial sequence
  Synthetic oligonucleotide
agcggtgtgtgatcgc

SEQ ID NO: 3519 - DNA, 16 bp, Artificial sequence
  Synthetic oligonucleotide
atggactttaccatcc

SEQ ID NO: 3520 - DNA, 16 bp, Artificial sequence
  Synthetic oligonucleotide
aacagtcaatcaaagc

SEQ ID NO: 3521 - DNA, 16 bp, Artificial sequence
  Synthetic oligonucleotide
catacaaccctattta

SEQ ID NO: 3522 - DNA, 16 bp, Artificial sequence
  Synthetic oligonucleotide
gaccttggtcattcat

SEQ ID NO: 3523 - DNA, 16 bp, Artificial sequence
  Synthetic oligonucleotide
aggacaaagtcatgcg

SEQ ID NO: 3524 - DNA, 16 bp, Artificial sequence
  Synthetic oligonucleotide
agtgtggagctacttt

SEQ ID NO: 3525 - DNA, 16 bp, Artificial sequence
  Synthetic oligonucleotide
tgcgccccgcccactg

SEQ ID NO: 3526 - DNA, 16 bp, Artificial sequence
  Synthetic oligonucleotide
gctctatagctatatt

SEQ ID NO: 3527 - DNA, 16 bp, Artificial sequence
  Synthetic oligonucleotide
aacctcgcaaaagcac

SEQ ID NO: 3528 - DNA, 16 bp, Artificial sequence
  Synthetic oligonucleotide
agagggccttacatga

SEQ ID NO: 3529 - DNA, 16 bp, Artificial sequence
  Synthetic oligonucleotide
ccctttggttcagtga

SEQ ID NO: 3530 - DNA, 16 bp, Artificial sequence
  Synthetic oligonucleotide
gtaagtgaggccctga

SEQ ID NO: 3531 - DNA, 16 bp, Artificial sequence
  Synthetic oligonucleotide
gcagcgactaactaca

SEQ ID NO: 3532 - DNA, 16 bp, Artificial sequence
  Synthetic oligonucleotide
gtgctaactcttgtct

SEQ ID NO: 3533 - DNA, 16 bp, Artificial sequence
  Synthetic oligonucleotide
gcacccgcgccccccc

SEQ ID NO: 3534 - DNA, 16 bp, Artificial sequence
  Synthetic oligonucleotide
caagcaatgcctatgg

SEQ ID NO: 3535 - DNA, 16 bp, Artificial sequence
  Synthetic oligonucleotide
cctaggccttaatacc

SEQ ID NO: 3536 - DNA, 16 bp, Artificial sequence
  Synthetic oligonucleotide
cgcttgtagatttcac

SEQ ID NO: 3537 - DNA, 16 bp, Artificial sequence
  Synthetic oligonucleotide
aaggcagttgcaattg

SEQ ID NO: 3538 - DNA, 16 bp, Artificial sequence
  Synthetic oligonucleotide
tgttgatacgcctggc

SEQ ID NO: 3539 - DNA, 16 bp, Artificial sequence
  Synthetic oligonucleotide
attcttacggtaagta

SEQ ID NO: 3540 - DNA, 16 bp, Artificial sequence
  Synthetic oligonucleotide
gtaaatggagaagttc

SEQ ID NO: 3541 - DNA, 16 bp, Artificial sequence
  Synthetic oligonucleotide
taatttctgggatggc

SEQ ID NO: 3542 - DNA, 16 bp, Artificial sequence
  Synthetic oligonucleotide
catgtttactgactgg

SEQ ID NO: 3543 - DNA, 16 bp, Artificial sequence
  Synthetic oligonucleotide
aaatgcagaaggtctc

SEQ ID NO: 3544 - DNA, 16 bp, Artificial sequence
  Synthetic oligonucleotide
gttacctaatttgtta

SEQ ID NO: 3545 - DNA, 16 bp, Artificial sequence
  Synthetic oligonucleotide
gagttattaacacctc

SEQ ID NO: 3546 - DNA, 16 bp, Artificial sequence
  Synthetic oligonucleotide
cgaagaagagtttggt

SEQ ID NO: 3547 - DNA, 16 bp, Artificial sequence
  Synthetic oligonucleotide
gctaagtataaaattg

SEQ ID NO: 3548 - DNA, 16 bp, Artificial sequence
  Synthetic oligonucleotide
gaatacctactgcttt

SEQ ID NO: 3549 - DNA, 16 bp, Artificial sequence
  Synthetic oligonucleotide
gtcaattaaagtaaga

SEQ ID NO: 3550 - DNA, 16 bp, Artificial sequence
  Synthetic oligonucleotide
tctactaaactaatca

SEQ ID NO: 3551 - DNA, 16 bp, Artificial sequence
  Synthetic oligonucleotide
aagtagcaaagcactg

SEQ ID NO: 3552 - DNA, 16 bp, Artificial sequence
  Synthetic oligonucleotide
catttaccttccattg

SEQ ID NO: 3553 - DNA, 16 bp, Artificial sequence
  Synthetic oligonucleotide
taatttggcaaaccat

SEQ ID NO: 3554 - DNA, 16 bp, Artificial sequence
  Synthetic oligonucleotide
agtgattagagcccag

SEQ ID NO: 3555 - DNA, 16 bp, Artificial sequence
  Synthetic oligonucleotide
ccattattggagtcac

SEQ ID NO: 3556 - DNA, 16 bp, Artificial sequence
  Synthetic oligonucleotide
aagcatctagattcct

SEQ ID NO: 3557 - DNA, 16 bp, Artificial sequence
  Synthetic oligonucleotide
tccaacaaacctaatc

SEQ ID NO: 3558 - DNA, 16 bp, Artificial sequence
  Synthetic oligonucleotide
tagcccccttcagtct

SEQ ID NO: 3559 - DNA, 16 bp, Artificial sequence
  Synthetic oligonucleotide
ctgcacctacgaagca

SEQ ID NO: 3560 - DNA, 16 bp, Artificial sequence
  Synthetic oligonucleotide
gaggcggctgagcttt

SEQ ID NO: 3561 - DNA, 16 bp, Artificial sequence
  Synthetic oligonucleotide
gcccctaaacagaagc

SEQ ID NO: 3562 - DNA, 16 bp, Artificial sequence
  Synthetic oligonucleotide
agtttggaaagtaccc

SEQ ID NO: 3563 - DNA, 16 bp, Artificial sequence
  Synthetic oligonucleotide
gctccggtctgggtgc

SEQ ID NO: 3564 - DNA, 16 bp, Artificial sequence
  Synthetic oligonucleotide
gaacggtcctggcccc

SEQ ID NO: 3565 - DNA, 16 bp, Artificial sequence
  Synthetic oligonucleotide
gccttcgcgccgcctg

SEQ ID NO: 3566 - DNA, 16 bp, Artificial sequence
  Synthetic oligonucleotide
actatggtttggagaa

SEQ ID NO: 3567 - DNA, 16 bp, Artificial sequence
  Synthetic oligonucleotide
tcaaccttagacacct

SEQ ID NO: 3568 - DNA, 16 bp, Artificial sequence
  Synthetic oligonucleotide
tctctaggtagagtga

SEQ ID NO: 3569 - DNA, 16 bp, Artificial sequence
  Synthetic oligonucleotide
aggcttagctatcata

SEQ ID NO: 3570 - DNA, 16 bp, Artificial sequence
  Synthetic oligonucleotide
caaagatgctgaggac

SEQ ID NO: 3571 - DNA, 16 bp, Artificial sequence
  Synthetic oligonucleotide
gaactggatctaaact

SEQ ID NO: 3572 - DNA, 16 bp, Artificial sequence
  Synthetic oligonucleotide
agtacggagactccca

SEQ ID NO: 3573 - DNA, 16 bp, Artificial sequence
  Synthetic oligonucleotide
tagcaccaactgacag

SEQ ID NO: 3574 - DNA, 16 bp, Artificial sequence
  Synthetic oligonucleotide
ctgcagccacaattgt

SEQ ID NO: 3575 - DNA, 16 bp, Artificial sequence
  Synthetic oligonucleotide
gaatatccccacacta

SEQ ID NO: 3576 - DNA, 16 bp, Artificial sequence
  Synthetic oligonucleotide
cctaaccagaacacta

SEQ ID NO: 3577 - DNA, 16 bp, Artificial sequence
  Synthetic oligonucleotide
tgggacttatggaact

SEQ ID NO: 3578 - DNA, 16 bp, Artificial sequence
  Synthetic oligonucleotide
aatgaggagtgatata

SEQ ID NO: 3579 - DNA, 16 bp, Artificial sequence
  Synthetic oligonucleotide
ccattaccctgtctta

SEQ ID NO: 3580 - DNA, 16 bp, Artificial sequence
  Synthetic oligonucleotide
gtgataagaatcccgt

SEQ ID NO: 3581 - DNA, 16 bp, Artificial sequence
  Synthetic oligonucleotide
gaggactttgtgagca

SEQ ID NO: 3582 - DNA, 16 bp, Artificial sequence
  Synthetic oligonucleotide
ttgggtagagattatg

SEQ ID NO: 3583 - DNA, 16 bp, Artificial sequence
  Synthetic oligonucleotide
cataggacaggctcaa

SEQ ID NO: 3584 - DNA, 16 bp, Artificial sequence
  Synthetic oligonucleotide
tccctacatctaaccc

SEQ ID NO: 3585 - DNA, 16 bp, Artificial sequence
  Synthetic oligonucleotide
agagcggcttccctta

SEQ ID NO: 3586 - DNA, 16 bp, Artificial sequence
  Synthetic oligonucleotide
acctccttttaggatc

SEQ ID NO: 3587 - DNA, 16 bp, Artificial sequence
  Synthetic oligonucleotide
gaataacacgcagcca

SEQ ID NO: 3588 - DNA, 16 bp, Artificial sequence
  Synthetic oligonucleotide
tcccacgcccaaacct

SEQ ID NO: 3589 - DNA, 16 bp, Artificial sequence
  Synthetic oligonucleotide
tgtccggtataagagc

SEQ ID NO: 3590 - DNA, 16 bp, Artificial sequence
  Synthetic oligonucleotide
tacaactttggtatca

SEQ ID NO: 3591 - DNA, 16 bp, Artificial sequence
  Synthetic oligonucleotide
accagcgcagtaagag

SEQ ID NO: 3592 - DNA, 16 bp, Artificial sequence
  Synthetic oligonucleotide
ataagtgatagctacc

SEQ ID NO: 3593 - DNA, 16 bp, Artificial sequence
  Synthetic oligonucleotide
aagagtgaactacact

SEQ ID NO: 3594 - DNA, 16 bp, Artificial sequence
  Synthetic oligonucleotide
aagttatttctcgaat

SEQ ID NO: 3595 - DNA, 16 bp, Artificial sequence
  Synthetic oligonucleotide
taagaggcctttgatt

SEQ ID NO: 3596 - DNA, 16 bp, Artificial sequence
  Synthetic oligonucleotide
agagcggtgtgtgatc

SEQ ID NO: 3597 - DNA, 16 bp, Artificial sequence
  Synthetic oligonucleotide
cacatggactttacca

SEQ ID NO: 3598 - DNA, 16 bp, Artificial sequence
  Synthetic oligonucleotide
caccagaggatgacaa

SEQ ID NO: 3599 - DNA, 16 bp, Artificial sequence
  Synthetic oligonucleotide
cccatacaaccctatt

SEQ ID NO: 3600 - DNA, 16 bp, Artificial sequence
  Synthetic oligonucleotide
aaccgtccctgtcatg

SEQ ID NO: 3601 - DNA, 16 bp, Artificial sequence
  Synthetic oligonucleotide
gcagctagatgtaaag

SEQ ID NO: 3602 - DNA, 16 bp, Artificial sequence
  Synthetic oligonucleotide
agacctgaatactgtc

SEQ ID NO: 3603 - DNA, 16 bp, Artificial sequence
  Synthetic oligonucleotide
taatccccccccacca

SEQ ID NO: 3604 - DNA, 16 bp, Artificial sequence
  Synthetic oligonucleotide
gtaacctcgcaaaagc

SEQ ID NO: 3605 - DNA, 16 bp, Artificial sequence
  Synthetic oligonucleotide
ctcactaagggtcagg

SEQ ID NO: 3606 - DNA, 16 bp, Artificial sequence
  Synthetic oligonucleotide
cagtacatccttatca

SEQ ID NO: 3607 - DNA, 16 bp, Artificial sequence
  Synthetic oligonucleotide
aagggtaagtgaggcc

SEQ ID NO: 3608 - DNA, 16 bp, Artificial sequence
  Synthetic oligonucleotide
agagaagtgcagcgac

SEQ ID NO: 3609 - DNA, 16 bp, Artificial sequence
  Synthetic oligonucleotide
caaagtgctaactctt

SEQ ID NO: 3610 - DNA, 16 bp, Artificial sequence
  Synthetic oligonucleotide
atgcacccgcgccccc

SEQ ID NO: 3611 - DNA, 16 bp, Artificial sequence
  Synthetic oligonucleotide
agcaagcaatgcctat

SEQ ID NO: 3612 - DNA, 16 bp, Artificial sequence
  Synthetic oligonucleotide
gccacctaggccttaa

SEQ ID NO: 3613 - DNA, 16 bp, Artificial sequence
  Synthetic oligonucleotide
cacgcttgtagatttc

SEQ ID NO: 3614 - DNA, 16 bp, Artificial sequence
  Synthetic oligonucleotide
gacgggaaaggcagtt

SEQ ID NO: 3615 - DNA, 16 bp, Artificial sequence
  Synthetic oligonucleotide
ctgttgatacgcctgg

SEQ ID NO: 3616 - DNA, 16 bp, Artificial sequence
  Synthetic oligonucleotide
tatattcttacggtaa

SEQ ID NO: 3617 - DNA, 16 bp, Artificial sequence
  Synthetic oligonucleotide
gacttaaaagcacctt

SEQ ID NO: 3618 - DNA, 16 bp, Artificial sequence
  Synthetic oligonucleotide
cgtaatttctgggatg

SEQ ID NO: 3619 - DNA, 16 bp, Artificial sequence
  Synthetic oligonucleotide
cttatatagttcttac

SEQ ID NO: 3620 - DNA, 16 bp, Artificial sequence
  Synthetic oligonucleotide
taaatgcagaaggtct

SEQ ID NO: 3621 - DNA, 16 bp, Artificial sequence
  Synthetic oligonucleotide
caaacggatttatcag

SEQ ID NO: 3622 - DNA, 16 bp, Artificial sequence
  Synthetic oligonucleotide
agtatgaagcactttt

SEQ ID NO: 3623 - DNA, 16 bp, Artificial sequence
  Synthetic oligonucleotide
acgaagaagagtttgg

SEQ ID NO: 3624 - DNA, 16 bp, Artificial sequence
  Synthetic oligonucleotide
aaatctctagttcgca

SEQ ID NO: 3625 - DNA, 16 bp, Artificial sequence
  Synthetic oligonucleotide
gttgaatacctactgc

SEQ ID NO: 3626 - DNA, 16 bp, Artificial sequence
  Synthetic oligonucleotide
aatctaagaggccttt

SEQ ID NO: 3627 - DNA, 16 bp, Artificial sequence
  Synthetic oligonucleotide
catacaagcacccacc

SEQ ID NO: 3628 - DNA, 16 bp, Artificial sequence
  Synthetic oligonucleotide
gtaagtagcaaagcac

SEQ ID NO: 3629 - DNA, 16 bp, Artificial sequence
  Synthetic oligonucleotide
tatagtacaggcttgt

SEQ ID NO: 3630 - DNA, 16 bp, Artificial sequence
  Synthetic oligonucleotide
ataatttggcaaacca

SEQ ID NO: 3631 - DNA, 16 bp, Artificial sequence
  Synthetic oligonucleotide
tacaagagtttctccc

SEQ ID NO: 3632 - DNA, 16 bp, Artificial sequence
  Synthetic oligonucleotide
accattattggagtca

SEQ ID NO: 3633 - DNA, 16 bp, Artificial sequence
  Synthetic oligonucleotide
ctgcttaccaaggcca

SEQ ID NO: 3634 - DNA, 16 bp, Artificial sequence
  Synthetic oligonucleotide
cagtggttaggcactc

SEQ ID NO: 3635 - DNA, 16 bp, Artificial sequence
  Synthetic oligonucleotide
gaggctagcccccttc

SEQ ID NO: 3636 - DNA, 16 bp, Artificial sequence
  Synthetic oligonucleotide
attactgtctgcacct

SEQ ID NO: 3637 - DNA, 16 bp, Artificial sequence
  Synthetic oligonucleotide
cgaaaccagaggcggc

SEQ ID NO: 3638 - DNA, 16 bp, Artificial sequence
  Synthetic oligonucleotide
attactccaagaccca

SEQ ID NO: 3639 - DNA, 16 bp, Artificial sequence
  Synthetic oligonucleotide
gctgtgaaagatctgg

SEQ ID NO: 3640 - DNA, 16 bp, Artificial sequence
  Synthetic oligonucleotide
cctgagctccggtctg

SEQ ID NO: 3641 - DNA, 16 bp, Artificial sequence
  Synthetic oligonucleotide
cgtagaggaacggtcc

SEQ ID NO: 3642 - DNA, 16 bp, Artificial sequence
  Synthetic oligonucleotide
caggagccttcgcgcc

SEQ ID NO: 3643 - DNA, 16 bp, Artificial sequence
  Synthetic oligonucleotide
ctgactatggtttgga

SEQ ID NO: 3644 - DNA, 16 bp, Artificial sequence
  Synthetic oligonucleotide
tgaactcaaccttaga

SEQ ID NO: 3645 - DNA, 16 bp, Artificial sequence
  Synthetic oligonucleotide
agggcatgtctctagg

SEQ ID NO: 3646 - DNA, 16 bp, Artificial sequence
  Synthetic oligonucleotide
ctgccaaaggcttagc

SEQ ID NO: 3647 - DNA, 16 bp, Artificial sequence
  Synthetic oligonucleotide
aagcaaagatgctgag

SEQ ID NO: 3648 - DNA, 16 bp, Artificial sequence
  Synthetic oligonucleotide
actgaactggatctaa

SEQ ID NO: 3649 - DNA, 16 bp, Artificial sequence
  Synthetic oligonucleotide
gtagcgagtacggaga

SEQ ID NO: 3650 - DNA, 16 bp, Artificial sequence
  Synthetic oligonucleotide
aaccctagtgcctctt

SEQ ID NO: 3651 - DNA, 16 bp, Artificial sequence
  Synthetic oligonucleotide
gtctgcagccacaatt

SEQ ID NO: 3652 - DNA, 16 bp, Artificial sequence
  Synthetic oligonucleotide
cataacgaatatcccc

SEQ ID NO: 3653 - DNA, 16 bp, Artificial sequence
  Synthetic oligonucleotide
ctaatcctaaccagaa

SEQ ID NO: 3654 - DNA, 16 bp, Artificial sequence
  Synthetic oligonucleotide
aactgggacttatgga

SEQ ID NO: 3655 - DNA, 16 bp, Artificial sequence
  Synthetic oligonucleotide
aacggcctctgaaagg

SEQ ID NO: 3656 - DNA, 16 bp, Artificial sequence
  Synthetic oligonucleotide
ttatcccattaccctg

SEQ ID NO: 3657 - DNA, 16 bp, Artificial sequence
  Synthetic oligonucleotide
gaacctacttactact

SEQ ID NO: 3658 - DNA, 16 bp, Artificial sequence
  Synthetic oligonucleotide
ctaacacctcagcatg

SEQ ID NO: 3659 - DNA, 16 bp, Artificial sequence
  Synthetic oligonucleotide
cattccttgggtagag

SEQ ID NO: 3660 - DNA, 16 bp, Artificial sequence
  Synthetic oligonucleotide
acaatggcagggacct

SEQ ID NO: 3661 - DNA, 16 bp, Artificial sequence
  Synthetic oligonucleotide
actccctacatctaac

SEQ ID NO: 3662 - DNA, 16 bp, Artificial sequence
  Synthetic oligonucleotide
gaatggtgtggcaaag

SEQ ID NO: 3663 - DNA, 16 bp, Artificial sequence
  Synthetic oligonucleotide
ccattgccaaggccca

SEQ ID NO: 3664 - DNA, 16 bp, Artificial sequence
  Synthetic oligonucleotide
gtctagttctgcactt

SEQ ID NO: 3665 - DNA, 16 bp, Artificial sequence
  Synthetic oligonucleotide
gactcccacgcccaaa

SEQ ID NO: 3666 - DNA, 16 bp, Artificial sequence
  Synthetic oligonucleotide
tctgagagtgtccggt

SEQ ID NO: 3667 - DNA, 16 bp, Artificial sequence
  Synthetic oligonucleotide
gatacaactttggtat

SEQ ID NO: 3668 - DNA, 16 bp, Artificial sequence
  Synthetic oligonucleotide
aacaaccagcgcagta

SEQ ID NO: 3669 - DNA, 16 bp, Artificial sequence
  Synthetic oligonucleotide
tcactagcaaccaagg

SEQ ID NO: 3670 - DNA, 16 bp, Artificial sequence
  Synthetic oligonucleotide
tgtatacacttctaag

SEQ ID NO: 3671 - DNA, 16 bp, Artificial sequence
  Synthetic oligonucleotide
tagtcccaaccccatt

SEQ ID NO: 3672 - DNA, 16 bp, Artificial sequence
  Synthetic oligonucleotide
cagccaaatctaagag

SEQ ID NO: 3673 - DNA, 16 bp, Artificial sequence
  Synthetic oligonucleotide
attagcctcagcacag

SEQ ID NO: 3674 - DNA, 16 bp, Artificial sequence
  Synthetic oligonucleotide
ccccgcttccacatgg

SEQ ID NO: 3675 - DNA, 16 bp, Artificial sequence
  Synthetic oligonucleotide
gacacaagagtgtcaa

SEQ ID NO: 3676 - DNA, 16 bp, Artificial sequence
  Synthetic oligonucleotide
ctaaccttgggctgtg

SEQ ID NO: 3677 - DNA, 16 bp, Artificial sequence
  Synthetic oligonucleotide
ctcaaccgtccctgtc

SEQ ID NO: 3678 - DNA, 16 bp, Artificial sequence
  Synthetic oligonucleotide
cgtaagcagctagatg

SEQ ID NO: 3679 - DNA, 16 bp, Artificial sequence
  Synthetic oligonucleotide
atgagacctgaatact

SEQ ID NO: 3680 - DNA, 16 bp, Artificial sequence
  Synthetic oligonucleotide
attaatccccccccac

SEQ ID NO: 3681 - DNA, 16 bp, Artificial sequence
  Synthetic oligonucleotide
ttggtaacctcgcaaa

SEQ ID NO: 3682 - DNA, 16 bp, Artificial sequence
  Synthetic oligonucleotide
attagctcactaaggg

SEQ ID NO: 3683 - DNA, 16 bp, Artificial sequence
  Synthetic oligonucleotide
cccagtacatccttat

SEQ ID NO: 3684 - DNA, 16 bp, Artificial sequence
  Synthetic oligonucleotide
tggcaagggtaagtga

SEQ ID NO: 3685 - DNA, 16 bp, Artificial sequence
  Synthetic oligonucleotide
agataccagattccat

SEQ ID NO: 3686 - DNA, 16 bp, Artificial sequence
  Synthetic oligonucleotide
tccacggcttgcatct

SEQ ID NO: 3687 - DNA, 16 bp, Artificial sequence
  Synthetic oligonucleotide
caatgcacccgcgccc

SEQ ID NO: 3688 - DNA, 16 bp, Artificial sequence
  Synthetic oligonucleotide
accaggtgaagcaagc

SEQ ID NO: 3689 - DNA, 16 bp, Artificial sequence
  Synthetic oligonucleotide
caatcttggccaccta

SEQ ID NO: 3690 - DNA, 16 bp, Artificial sequence
  Synthetic oligonucleotide
atgcacgcttgtagat

SEQ ID NO: 3691 - DNA, 16 bp, Artificial sequence
  Synthetic oligonucleotide
tgacgggaaaggcagt

SEQ ID NO: 3692 - DNA, 16 bp, Artificial sequence
  Synthetic oligonucleotide
cctgttgatacgcctg

SEQ ID NO: 3693 - DNA, 16 bp, Artificial sequence
  Synthetic oligonucleotide
gctagtttgtcagggt

SEQ ID NO: 3694 - DNA, 16 bp, Artificial sequence
  Synthetic oligonucleotide
gtatattcttacggta

SEQ ID NO: 3695 - DNA, 16 bp, Artificial sequence
  Synthetic oligonucleotide
tgacttaaaagcacct

SEQ ID NO: 3696 - DNA, 16 bp, Artificial sequence
  Synthetic oligonucleotide
catttactcagttgcc

SEQ ID NO: 3697 - DNA, 16 bp, Artificial sequence
  Synthetic oligonucleotide
actacgccaagctcct

SEQ ID NO: 3698 - DNA, 16 bp, Artificial sequence
  Synthetic oligonucleotide
ataaatgcagaaggtc

SEQ ID NO: 3699 - DNA, 16 bp, Artificial sequence
  Synthetic oligonucleotide
aacttagtgtctttca

SEQ ID NO: 3700 - DNA, 16 bp, Artificial sequence
  Synthetic oligonucleotide
gcaaagtggaggcctg

SEQ ID NO: 3701 - DNA, 16 bp, Artificial sequence
  Synthetic oligonucleotide
gcaacgaagaagagtt

SEQ ID NO: 3702 - DNA, 16 bp, Artificial sequence
  Synthetic oligonucleotide
ttaaatctctagttcg

SEQ ID NO: 3703 - DNA, 16 bp, Artificial sequence
  Synthetic oligonucleotide
tcagaattagaggatc

SEQ ID NO: 3704 - DNA, 16 bp, Artificial sequence
  Synthetic oligonucleotide
aaatctaagaggcctt

SEQ ID NO: 3705 - DNA, 16 bp, Artificial sequence
  Synthetic oligonucleotide
atatgcatctcattcc

SEQ ID NO: 3706 - DNA, 16 bp, Artificial sequence
  Synthetic oligonucleotide
catttaacagagccag

SEQ ID NO: 3707 - DNA, 16 bp, Artificial sequence
  Synthetic oligonucleotide
ggtcttatagtacagg

SEQ ID NO: 3708 - DNA, 16 bp, Artificial sequence
  Synthetic oligonucleotide
gataatttggcaaacc

SEQ ID NO: 3709 - DNA, 16 bp, Artificial sequence
  Synthetic oligonucleotide
cttacaagagtttctc

SEQ ID NO: 3710 - DNA, 16 bp, Artificial sequence
  Synthetic oligonucleotide
aaatctatatgccact

SEQ ID NO: 3711 - DNA, 16 bp, Artificial sequence
  Synthetic oligonucleotide
cctaacctgcttacca

SEQ ID NO: 3712 - DNA, 16 bp, Artificial sequence
  Synthetic oligonucleotide
tatatgcatggtctgt

SEQ ID NO: 3713 - DNA, 16 bp, Artificial sequence
  Synthetic oligonucleotide
agagaggctagccccc

SEQ ID NO: 3714 - DNA, 16 bp, Artificial sequence
  Synthetic oligonucleotide
cccgctattactgtct

SEQ ID NO: 3715 - DNA, 16 bp, Artificial sequence
  Synthetic oligonucleotide
actcgaaaccagaggc

SEQ ID NO: 3716 - DNA, 16 bp, Artificial sequence
  Synthetic oligonucleotide
ataaaggctctcctcg

SEQ ID NO: 3717 - DNA, 16 bp, Artificial sequence
  Synthetic oligonucleotide
gaggacatgcatggct

SEQ ID NO: 3718 - DNA, 16 bp, Artificial sequence
  Synthetic oligonucleotide
cccaacaagcctgagc

SEQ ID NO: 3719 - DNA, 16 bp, Artificial sequence
  Synthetic oligonucleotide
ttccgtttgtctccaa

SEQ ID NO: 3720 - DNA, 16 bp, Artificial sequence
  Synthetic oligonucleotide
gcgcgggtcaggagcc

SEQ ID NO: 3721 - DNA, 16 bp, Artificial sequence
  Synthetic oligonucleotide
aagtcctaaaagggtg

SEQ ID NO: 3722 - DNA, 16 bp, Artificial sequence
  Synthetic oligonucleotide
cacagaaacgattatg

SEQ ID NO: 3723 - DNA, 16 bp, Artificial sequence
  Synthetic oligonucleotide
ctaagggcatgtctct

SEQ ID NO: 3724 - DNA, 16 bp, Artificial sequence
  Synthetic oligonucleotide
cgtttgatccaatgtc

SEQ ID NO: 3725 - DNA, 16 bp, Artificial sequence
  Synthetic oligonucleotide
ccatatctcacaagca

SEQ ID NO: 3726 - DNA, 16 bp, Artificial sequence
  Synthetic oligonucleotide
ggaccaaaggccactt

SEQ ID NO: 3727 - DNA, 16 bp, Artificial sequence
  Synthetic oligonucleotide
gtcagtagcgagtacg

SEQ ID NO: 3728 - DNA, 16 bp, Artificial sequence
  Synthetic oligonucleotide
ataaccctagtgcctc

SEQ ID NO: 3729 - DNA, 16 bp, Artificial sequence
  Synthetic oligonucleotide
tgtctgcagccacaat

SEQ ID NO: 3730 - DNA, 16 bp, Artificial sequence
  Synthetic oligonucleotide
atatcataacgaatat

SEQ ID NO: 3731 - DNA, 16 bp, Artificial sequence
  Synthetic oligonucleotide
cacaatcaatcctaat

SEQ ID NO: 3732 - DNA, 16 bp, Artificial sequence
  Synthetic oligonucleotide
atgtgagaatggtggg

SEQ ID NO: 3733 - DNA, 16 bp, Artificial sequence
  Synthetic oligonucleotide
aatgaacggcctctga

SEQ ID NO: 3734 - DNA, 16 bp, Artificial sequence
  Synthetic oligonucleotide
tggaacctccccgaga

SEQ ID NO: 3735 - DNA, 16 bp, Artificial sequence
  Synthetic oligonucleotide
gagggaacctacttac

SEQ ID NO: 3736 - DNA, 16 bp, Artificial sequence
  Synthetic oligonucleotide
gtgcctaacacctcag

SEQ ID NO: 3737 - DNA, 16 bp, Artificial sequence
  Synthetic oligonucleotide
atctcataagagcctg

SEQ ID NO: 3738 - DNA, 16 bp, Artificial sequence
  Synthetic oligonucleotide
ccaactccttgtgagc

SEQ ID NO: 3739 - DNA, 16 bp, Artificial sequence
  Synthetic oligonucleotide
cctaactccctacatc

SEQ ID NO: 3740 - DNA, 16 bp, Artificial sequence
  Synthetic oligonucleotide
cagacttagaatccac

SEQ ID NO: 3741 - DNA, 16 bp, Artificial sequence
  Synthetic oligonucleotide
ttctaccccattgcca

SEQ ID NO: 3742 - DNA, 16 bp, Artificial sequence
  Synthetic oligonucleotide
caggactcccacgccc

SEQ ID NO: 3743 - DNA, 16 bp, Artificial sequence
  Synthetic oligonucleotide
ctctttgcaggcctcc

SEQ ID NO: 3744 - DNA, 16 bp, Artificial sequence
  Synthetic oligonucleotide
ttgatacaactttggt

SEQ ID NO: 3745 - DNA, 16 bp, Artificial sequence
  Synthetic oligonucleotide
aggtaacaaccagcgc

SEQ ID NO: 3746 - DNA, 16 bp, Artificial sequence
  Synthetic oligonucleotide
cctcactagcaaccaa

SEQ ID NO: 3747 - DNA, 16 bp, Artificial sequence
  Synthetic oligonucleotide
agaggacaatgtatac

SEQ ID NO: 3748 - DNA, 16 bp, Artificial sequence
  Synthetic oligonucleotide
ttttagtcccaacccc

SEQ ID NO: 3749 - DNA, 16 bp, Artificial sequence
  Synthetic oligonucleotide
atcaactagtccagct

SEQ ID NO: 3750 - DNA, 16 bp, Artificial sequence
  Synthetic oligonucleotide
ctctgatcatggccat

SEQ ID NO: 3751 - DNA, 16 bp, Artificial sequence
  Synthetic oligonucleotide
caccccgcttccacat

SEQ ID NO: 3752 - DNA, 16 bp, Artificial sequence
  Synthetic oligonucleotide
atgtgacacaagagtg

SEQ ID NO: 3753 - DNA, 16 bp, Artificial sequence
  Synthetic oligonucleotide
tctagacaaggtcacc

SEQ ID NO: 3754 - DNA, 16 bp, Artificial sequence
  Synthetic oligonucleotide
agtgtaacactcaacc

SEQ ID NO: 3755 - DNA, 16 bp, Artificial sequence
  Synthetic oligonucleotide
gtggaccaacagataa

SEQ ID NO: 3756 - DNA, 16 bp, Artificial sequence
  Synthetic oligonucleotide
tccagggatgagacct

SEQ ID NO: 3757 - DNA, 16 bp, Artificial sequence
  Synthetic oligonucleotide
cttttattaatccccc

SEQ ID NO: 3758 - DNA, 16 bp, Artificial sequence
  Synthetic oligonucleotide
ctttggtaacctcgca

SEQ ID NO: 3759 - DNA, 16 bp, Artificial sequence
  Synthetic oligonucleotide
gctgattagctcacta

SEQ ID NO: 3760 - DNA, 16 bp, Artificial sequence
  Synthetic oligonucleotide
aattcccagtacatcc

SEQ ID NO: 3761 - DNA, 16 bp, Artificial sequence
  Synthetic oligonucleotide
atgtatcaccaggtcc

SEQ ID NO: 3762 - DNA, 16 bp, Artificial sequence
  Synthetic oligonucleotide
gaggagataccagatt

SEQ ID NO: 3763 - DNA, 16 bp, Artificial sequence
  Synthetic oligonucleotide
ccccactcttccacgg

SEQ ID NO: 3764 - DNA, 16 bp, Artificial sequence
  Synthetic oligonucleotide
ggattcatgcagttcc

SEQ ID NO: 3765 - DNA, 16 bp, Artificial sequence
  Synthetic oligonucleotide
cataccaggtgaagca

SEQ ID NO: 3766 - DNA, 16 bp, Artificial sequence
  Synthetic oligonucleotide
tccaggtccagaattg

SEQ ID NO: 3767 - DNA, 16 bp, Artificial sequence
  Synthetic oligonucleotide
tcctgttgatacgcct

SEQ ID NO: 3768 - DNA, 16 bp, Artificial sequence
  Synthetic oligonucleotide
gtgattagcaaaggag

SEQ ID NO: 3769 - DNA, 16 bp, Artificial sequence
  Synthetic oligonucleotide
agagatcaactagtcc

SEQ ID NO: 3770 - DNA, 16 bp, Artificial sequence
  Synthetic oligonucleotide
tgtatattcttacggt

SEQ ID NO: 3771 - DNA, 16 bp, Artificial sequence
  Synthetic oligonucleotide
tatgacttaaaagcac

SEQ ID NO: 3772 - DNA, 16 bp, Artificial sequence
  Synthetic oligonucleotide
acaacttagcaactcc

SEQ ID NO: 3773 - DNA, 16 bp, Artificial sequence
  Synthetic oligonucleotide
aagtgataagaatccc

SEQ ID NO: 3774 - DNA, 16 bp, Artificial sequence
  Synthetic oligonucleotide
ccataaatgcagaagg

SEQ ID NO: 3775 - DNA, 16 bp, Artificial sequence
  Synthetic oligonucleotide
tcaaaacttagtgtct

SEQ ID NO: 3776 - DNA, 16 bp, Artificial sequence
  Synthetic oligonucleotide
tagattaacacaagcc

SEQ ID NO: 3777 - DNA, 16 bp, Artificial sequence
  Synthetic oligonucleotide
cgtagagaaagagcca

SEQ ID NO: 3778 - DNA, 16 bp, Artificial sequence
  Synthetic oligonucleotide
acatagtgttggctat

SEQ ID NO: 3779 - DNA, 16 bp, Artificial sequence
  Synthetic oligonucleotide
tcgaatcaaatcagaa

SEQ ID NO: 3780 - DNA, 16 bp, Artificial sequence
  Synthetic oligonucleotide
agccaaatctaagagg

SEQ ID NO: 3781 - DNA, 16 bp, Artificial sequence
  Synthetic oligonucleotide
tacagatagcctcagt

SEQ ID NO: 3782 - DNA, 16 bp, Artificial sequence
  Synthetic oligonucleotide
tcatttaacagagcca

SEQ ID NO: 3783 - DNA, 16 bp, Artificial sequence
  Synthetic oligonucleotide
tttcaatgtgactggg

SEQ ID NO: 3784 - DNA, 16 bp, Artificial sequence
  Synthetic oligonucleotide
ctattaaatgagagtc

SEQ ID NO: 3785 - DNA, 16 bp, Artificial sequence
  Synthetic oligonucleotide
aacttacaagagtttc

SEQ ID NO: 3786 - DNA, 16 bp, Artificial sequence
  Synthetic oligonucleotide
atagatgacaccgctg

SEQ ID NO: 3787 - DNA, 16 bp, Artificial sequence
  Synthetic oligonucleotide
ctccctaacctgctta

SEQ ID NO: 3788 - DNA, 16 bp, Artificial sequence
  Synthetic oligonucleotide
gcccgttatatgccaa

SEQ ID NO: 3789 - DNA, 16 bp, Artificial sequence
  Synthetic oligonucleotide
tgattcatagcctcct

SEQ ID NO: 3790 - DNA, 16 bp, Artificial sequence
  Synthetic oligonucleotide
gtccccgctattactg

SEQ ID NO: 3791 - DNA, 16 bp, Artificial sequence
  Synthetic oligonucleotide
cgacttttactcgaaa

SEQ ID NO: 3792 - DNA, 16 bp, Artificial sequence
  Synthetic oligonucleotide
agaccataaaggctct

SEQ ID NO: 3793 - DNA, 16 bp, Artificial sequence
  Synthetic oligonucleotide
cctgttagaggacatg

SEQ ID NO: 3794 - DNA, 16 bp, Artificial sequence
  Synthetic oligonucleotide
cgaaccccaacaagcc

SEQ ID NO: 3795 - DNA, 16 bp, Artificial sequence
  Synthetic oligonucleotide
cattccgtttgtctcc

SEQ ID NO: 3796 - DNA, 16 bp, Artificial sequence
  Synthetic oligonucleotide
ccgcgcgggtcaggag

SEQ ID NO: 3797 - DNA, 16 bp, Artificial sequence
  Synthetic oligonucleotide
atgggacctgtgaact

SEQ ID NO: 3798 - DNA, 16 bp, Artificial sequence
  Synthetic oligonucleotide
gagaagttccacatgc

SEQ ID NO: 3799 - DNA, 16 bp, Artificial sequence
  Synthetic oligonucleotide
ggcactaagggcatgt

SEQ ID NO: 3800 - DNA, 16 bp, Artificial sequence
  Synthetic oligonucleotide
tagccccactgtcact

SEQ ID NO: 3801 - DNA, 16 bp, Artificial sequence
  Synthetic oligonucleotide
tcccttaatttgaccc

SEQ ID NO: 3802 - DNA, 16 bp, Artificial sequence
  Synthetic oligonucleotide
tggattatgcaaagcc

SEQ ID NO: 3803 - DNA, 16 bp, Artificial sequence
  Synthetic oligonucleotide
gtaaccaccaggtgtc

SEQ ID NO: 3804 - DNA, 16 bp, Artificial sequence
  Synthetic oligonucleotide
ctaaggaggcattgta

SEQ ID NO: 3805 - DNA, 16 bp, Artificial sequence
  Synthetic oligonucleotide
tattgtctgcagccac

SEQ ID NO: 3806 - DNA, 16 bp, Artificial sequence
  Synthetic oligonucleotide
gcactggatacaatat

SEQ ID NO: 3807 - DNA, 16 bp, Artificial sequence
  Synthetic oligonucleotide
tctcttatacacaatc

SEQ ID NO: 3808 - DNA, 16 bp, Artificial sequence
  Synthetic oligonucleotide
aggtcctaaagtttct

SEQ ID NO: 3809 - DNA, 16 bp, Artificial sequence
  Synthetic oligonucleotide
accaatgaacggcctc

SEQ ID NO: 3810 - DNA, 16 bp, Artificial sequence
  Synthetic oligonucleotide
tatggaacctccccga

SEQ ID NO: 3811 - DNA, 16 bp, Artificial sequence
  Synthetic oligonucleotide
cagagggaacctactt

SEQ ID NO: 3812 - DNA, 16 bp, Artificial sequence
  Synthetic oligonucleotide
gctttggtgttgagca

SEQ ID NO: 3813 - DNA, 16 bp, Artificial sequence
  Synthetic oligonucleotide
ttgtaccaccagggtc

SEQ ID NO: 3814 - DNA, 16 bp, Artificial sequence
  Synthetic oligonucleotide
tacccatagtgatgca

SEQ ID NO: 3815 - DNA, 16 bp, Artificial sequence
  Synthetic oligonucleotide
agttacacaccagttg

SEQ ID NO: 3816 - DNA, 16 bp, Artificial sequence
  Synthetic oligonucleotide
atatgcttgcaatcta

SEQ ID NO: 3817 - DNA, 16 bp, Artificial sequence
  Synthetic oligonucleotide
gcaattctaccccatt

SEQ ID NO: 3818 - DNA, 16 bp, Artificial sequence
  Synthetic oligonucleotide
gccatagaaaatgacg

SEQ ID NO: 3819 - DNA, 16 bp, Artificial sequence
  Synthetic oligonucleotide
gtattccagctaactt

SEQ ID NO: 3820 - DNA, 16 bp, Artificial sequence
  Synthetic oligonucleotide
catagtgctagactgt

SEQ ID NO: 3821 - DNA, 16 bp, Artificial sequence
  Synthetic oligonucleotide
ccaaccttggtgctga

SEQ ID NO: 3822 - DNA, 16 bp, Artificial sequence
  Synthetic oligonucleotide
gccaggttattagcac

SEQ ID NO: 3823 - DNA, 16 bp, Artificial sequence
  Synthetic oligonucleotide
gctccccaatcagagc

SEQ ID NO: 3824 - DNA, 16 bp, Artificial sequence
  Synthetic oligonucleotide
tatagagagccacatg

SEQ ID NO: 3825 - DNA, 16 bp, Artificial sequence
  Synthetic oligonucleotide
cgagacctcacataca

SEQ ID NO: 3826 - DNA, 16 bp, Artificial sequence
  Synthetic oligonucleotide
acaacccgtatttttt

SEQ ID NO: 3827 - DNA, 16 bp, Artificial sequence
  Synthetic oligonucleotide
gacttggatgcacccc

SEQ ID NO: 3828 - DNA, 16 bp, Artificial sequence
  Synthetic oligonucleotide
ggagacctctcatgtg

SEQ ID NO: 3829 - DNA, 16 bp, Artificial sequence
  Synthetic oligonucleotide
gtggttaatcatttac

SEQ ID NO: 3830 - DNA, 16 bp, Artificial sequence
  Synthetic oligonucleotide
agtacctcactatatt

SEQ ID NO: 3831 - DNA, 16 bp, Artificial sequence
  Synthetic oligonucleotide
aaatgtggaccaacag

SEQ ID NO: 3832 - DNA, 16 bp, Artificial sequence
  Synthetic oligonucleotide
cgggcatgcacgcttg

SEQ ID NO: 3833 - DNA, 16 bp, Artificial sequence
  Synthetic oligonucleotide
ccatcccacaactatt

SEQ ID NO: 3834 - DNA, 16 bp, Artificial sequence
  Synthetic oligonucleotide
cttaagccacctttga

SEQ ID NO: 3835 - DNA, 16 bp, Artificial sequence
  Synthetic oligonucleotide
tactttggtaacctcg

SEQ ID NO: 3836 - DNA, 16 bp, Artificial sequence
  Synthetic oligonucleotide
taggctgattagctca

SEQ ID NO: 3837 - DNA, 16 bp, Artificial sequence
  Synthetic oligonucleotide
aggtcaaaggaagtag

SEQ ID NO: 3838 - DNA, 16 bp, Artificial sequence
  Synthetic oligonucleotide
ggagatgtatcaccag

SEQ ID NO: 3839 - DNA, 16 bp, Artificial sequence
  Synthetic oligonucleotide
ctgactaagaggagat

SEQ ID NO: 3840 - DNA, 16 bp, Artificial sequence
  Synthetic oligonucleotide
attgttgattgcagaa

SEQ ID NO: 3841 - DNA, 16 bp, Artificial sequence
  Synthetic oligonucleotide
gtgggattcatgcagt

SEQ ID NO: 3842 - DNA, 16 bp, Artificial sequence
  Synthetic oligonucleotide
cctaacagagttgcca

SEQ ID NO: 3843 - DNA, 16 bp, Artificial sequence
  Synthetic oligonucleotide
caattgctgggtagga

SEQ ID NO: 3844 - DNA, 16 bp, Artificial sequence
  Synthetic oligonucleotide
ttcctgttgatacgcc

SEQ ID NO: 3845 - DNA, 16 bp, Artificial sequence
  Synthetic oligonucleotide
tagattttcacctaag

SEQ ID NO: 3846 - DNA, 16 bp, Artificial sequence
  Synthetic oligonucleotide
ataatacatggtgcaa

SEQ ID NO: 3847 - DNA, 16 bp, Artificial sequence
  Synthetic oligonucleotide
atcacatagatgacac

SEQ ID NO: 3848 - DNA, 16 bp, Artificial sequence
  Synthetic oligonucleotide
ttgtatattcttacgg

SEQ ID NO: 3849 - DNA, 16 bp, Artificial sequence
  Synthetic oligonucleotide
cgttttatgacttaaa

SEQ ID NO: 3850 - DNA, 16 bp, Artificial sequence
  Synthetic oligonucleotide
tttagattaagcctga

SEQ ID NO: 3851 - DNA, 16 bp, Artificial sequence
  Synthetic oligonucleotide
gattttaaactcaccc

SEQ ID NO: 3852 - DNA, 16 bp, Artificial sequence
  Synthetic oligonucleotide
tgtaaaacatgaaccc

SEQ ID NO: 3853 - DNA, 16 bp, Artificial sequence
  Synthetic oligonucleotide
ggtaattcacaatgta

SEQ ID NO: 3854 - DNA, 16 bp, Artificial sequence
  Synthetic oligonucleotide
gttctatttagatcaa

SEQ ID NO: 3855 - DNA, 16 bp, Artificial sequence
  Synthetic oligonucleotide
gtatagacatccacag

SEQ ID NO: 3856 - DNA, 16 bp, Artificial sequence
  Synthetic oligonucleotide
agacaatacatagtgt

SEQ ID NO: 3857 - DNA, 16 bp, Artificial sequence
  Synthetic oligonucleotide
tctcgaatcaaatcag

SEQ ID NO: 3858 - DNA, 16 bp, Artificial sequence
  Synthetic oligonucleotide
caactagtccagctcc

SEQ ID NO: 3859 - DNA, 16 bp, Artificial sequence
  Synthetic oligonucleotide
actttgctagttctta

SEQ ID NO: 3860 - DNA, 16 bp, Artificial sequence
  Synthetic oligonucleotide
agtcatttaacagagc

SEQ ID NO: 3861 - DNA, 16 bp, Artificial sequence
  Synthetic oligonucleotide
tatcccaaggagccca

SEQ ID NO: 3862 - DNA, 16 bp, Artificial sequence
  Synthetic oligonucleotide
acagtttaatggctat

SEQ ID NO: 3863 - DNA, 16 bp, Artificial sequence
  Synthetic oligonucleotide
gacaatacaaatgtgc

SEQ ID NO: 3864 - DNA, 16 bp, Artificial sequence
  Synthetic oligonucleotide
cccggctggccaaggc

SEQ ID NO: 3865 - DNA, 16 bp, Artificial sequence
  Synthetic oligonucleotide
gtacttgtaaacactg

SEQ ID NO: 3866 - DNA, 16 bp, Artificial sequence
  Synthetic oligonucleotide
gctgattcatagcctc

SEQ ID NO: 3867 - DNA, 16 bp, Artificial sequence
  Synthetic oligonucleotide
cggtccccgctattac

SEQ ID NO: 3868 - DNA, 16 bp, Artificial sequence
  Synthetic oligonucleotide
gcggcgacttttactc

SEQ ID NO: 3869 - DNA, 16 bp, Artificial sequence
  Synthetic oligonucleotide
atagaccataaaggct

SEQ ID NO: 3870 - DNA, 16 bp, Artificial sequence
  Synthetic oligonucleotide
gctgggatgacctgtt

SEQ ID NO: 3871 - DNA, 16 bp, Artificial sequence
  Synthetic oligonucleotide
ggacacgaaccccaac

SEQ ID NO: 3872 - DNA, 16 bp, Artificial sequence
  Synthetic oligonucleotide
ctccgcattccgtttg

SEQ ID NO: 3873 - DNA, 16 bp, Artificial sequence
  Synthetic oligonucleotide
gcccgcgcgggtcagg

SEQ ID NO: 3874 - DNA, 16 bp, Artificial sequence
  Synthetic oligonucleotide
gacatgggacctgtga

SEQ ID NO: 3875 - DNA, 16 bp, Artificial sequence
  Synthetic oligonucleotide
acctagccacaccgcc

SEQ ID NO: 3876 - DNA, 16 bp, Artificial sequence
  Synthetic oligonucleotide
gatcaggagggcacta

SEQ ID NO: 3877 - DNA, 16 bp, Artificial sequence
  Synthetic oligonucleotide
agtgagctagccccac

SEQ ID NO: 3878 - DNA, 16 bp, Artificial sequence
  Synthetic oligonucleotide
acctagttggtgcttc

SEQ ID NO: 3879 - DNA, 16 bp, Artificial sequence
  Synthetic oligonucleotide
caactggattatgcaa

SEQ ID NO: 3880 - DNA, 16 bp, Artificial sequence
  Synthetic oligonucleotide
ttgtaaccaccaggtg

SEQ ID NO: 3881 - DNA, 16 bp, Artificial sequence
  Synthetic oligonucleotide
cacactaaggaggcat

SEQ ID NO: 3882 - DNA, 16 bp, Artificial sequence
  Synthetic oligonucleotide
ttattgtctgcagcca

SEQ ID NO: 3883 - DNA, 16 bp, Artificial sequence
  Synthetic oligonucleotide
gggccggagaggcact

SEQ ID NO: 3884 - DNA, 16 bp, Artificial sequence
  Synthetic oligonucleotide
gcccctatcatttgaa

SEQ ID NO: 3885 - DNA, 16 bp, Artificial sequence
  Synthetic oligonucleotide
tatacctggagaggtg

SEQ ID NO: 3886 - DNA, 16 bp, Artificial sequence
  Synthetic oligonucleotide
ttaagaccaatgaacg

SEQ ID NO: 3887 - DNA, 16 bp, Artificial sequence
  Synthetic oligonucleotide
tctgtatggaacctcc

SEQ ID NO: 3888 - DNA, 16 bp, Artificial sequence
  Synthetic oligonucleotide
ctctcttaatcaaggc

SEQ ID NO: 3889 - DNA, 16 bp, Artificial sequence
  Synthetic oligonucleotide
attacaggaaagctca

SEQ ID NO: 3890 - DNA, 16 bp, Artificial sequence
  Synthetic oligonucleotide
tcccttgtaccaccag

SEQ ID NO: 3891 - DNA, 16 bp, Artificial sequence
  Synthetic oligonucleotide
actacccatagtgatg

SEQ ID NO: 3892 - DNA, 16 bp, Artificial sequence
  Synthetic oligonucleotide
tcagttacacaccagt

SEQ ID NO: 3893 - DNA, 16 bp, Artificial sequence
  Synthetic oligonucleotide
cagactactagttttt

SEQ ID NO: 3894 - DNA, 16 bp, Artificial sequence
  Synthetic oligonucleotide
gcccgtttacaagcac

SEQ ID NO: 3895 - DNA, 16 bp, Artificial sequence
  Synthetic oligonucleotide
ttggccatagaaaatg

SEQ ID NO: 3896 - DNA, 16 bp, Artificial sequence
  Synthetic oligonucleotide
caaggtattccagcta

SEQ ID NO: 3897 - DNA, 16 bp, Artificial sequence
  Synthetic oligonucleotide
acctcccatttgcata

SEQ ID NO: 3898 - DNA, 16 bp, Artificial sequence
  Synthetic oligonucleotide
atatccaaccttggtg

SEQ ID NO: 3899 - DNA, 16 bp, Artificial sequence
  Synthetic oligonucleotide
tcacaccaagcagtat

SEQ ID NO: 3900 - DNA, 16 bp, Artificial sequence
  Synthetic oligonucleotide
gcaagattcaagagct

SEQ ID NO: 3901 - DNA, 16 bp, Artificial sequence
  Synthetic oligonucleotide
ttcgcatcattaacaa

SEQ ID NO: 3902 - DNA, 16 bp, Artificial sequence
  Synthetic oligonucleotide
gataattcctcggatt

SEQ ID NO: 3903 - DNA, 16 bp, Artificial sequence
  Synthetic oligonucleotide
aaactactacgagacc

SEQ ID NO: 3904 - DNA, 16 bp, Artificial sequence
  Synthetic oligonucleotide
cttggacaacccgtat

SEQ ID NO: 3905 - DNA, 16 bp, Artificial sequence
  Synthetic oligonucleotide
tccgcagacttggatg

SEQ ID NO: 3906 - DNA, 16 bp, Artificial sequence
  Synthetic oligonucleotide
taaggagacctctcat

SEQ ID NO: 3907 - DNA, 16 bp, Artificial sequence
  Synthetic oligonucleotide
agcaaccatccaggag

SEQ ID NO: 3908 - DNA, 16 bp, Artificial sequence
  Synthetic oligonucleotide
ctgctattacagctca

SEQ ID NO: 3909 - DNA, 16 bp, Artificial sequence
  Synthetic oligonucleotide
gccgggcatgcacgct

SEQ ID NO: 3910 - DNA, 16 bp, Artificial sequence
  Synthetic oligonucleotide
gtggatccatcccaca

SEQ ID NO: 3911 - DNA, 16 bp, Artificial sequence
  Synthetic oligonucleotide
tgacttaagccacctt

SEQ ID NO: 3912 - DNA, 16 bp, Artificial sequence
  Synthetic oligonucleotide
aagtgtactttggtaa

SEQ ID NO: 3913 - DNA, 16 bp, Artificial sequence
  Synthetic oligonucleotide
ctctcatataataggc

SEQ ID NO: 3914 - DNA, 16 bp, Artificial sequence
  Synthetic oligonucleotide
gagtgattagagccca

SEQ ID NO: 3915 - DNA, 16 bp, Artificial sequence
  Synthetic oligonucleotide
agtaggtggagatgta

SEQ ID NO: 3916 - DNA, 16 bp, Artificial sequence
  Synthetic oligonucleotide
cgatttcactgactaa

SEQ ID NO: 3917 - DNA, 16 bp, Artificial sequence
  Synthetic oligonucleotide
taattgttgattgcag

SEQ ID NO: 3918 - DNA, 16 bp, Artificial sequence
  Synthetic oligonucleotide
cgtgtgggattcatgc

SEQ ID NO: 3919 - DNA, 16 bp, Artificial sequence
  Synthetic oligonucleotide
ccccctaacagagttg

SEQ ID NO: 3920 - DNA, 16 bp, Artificial sequence
  Synthetic oligonucleotide
gctgacaattgctggg

SEQ ID NO: 3921 - DNA, 16 bp, Artificial sequence
  Synthetic oligonucleotide
attcctgttgatacgc

SEQ ID NO: 3922 - DNA, 16 bp, Artificial sequence
  Synthetic oligonucleotide
tagttcgcatcattaa

SEQ ID NO: 3923 - DNA, 16 bp, Artificial sequence
  Synthetic oligonucleotide
cctagattttcaccta

SEQ ID NO: 3924 - DNA, 16 bp, Artificial sequence
  Synthetic oligonucleotide
attgtatattcttacg

SEQ ID NO: 3925 - DNA, 16 bp, Artificial sequence
  Synthetic oligonucleotide
atagatatcctgagtc

SEQ ID NO: 3926 - DNA, 16 bp, Artificial sequence
  Synthetic oligonucleotide
ggaagatagcggcaga

SEQ ID NO: 3927 - DNA, 16 bp, Artificial sequence
  Synthetic oligonucleotide
gatatttggatcttgg

SEQ ID NO: 3928 - DNA, 16 bp, Artificial sequence
  Synthetic oligonucleotide
gccacgaagattttaa

SEQ ID NO: 3929 - DNA, 16 bp, Artificial sequence
  Synthetic oligonucleotide
atatcaatctccctcc

SEQ ID NO: 3930 - DNA, 16 bp, Artificial sequence
  Synthetic oligonucleotide
attacaaacctgttct

SEQ ID NO: 3931 - DNA, 16 bp, Artificial sequence
  Synthetic oligonucleotide
aaactatgtaattgcg

SEQ ID NO: 3932 - DNA, 16 bp, Artificial sequence
  Synthetic oligonucleotide
gataatacacaacatc

SEQ ID NO: 3933 - DNA, 16 bp, Artificial sequence
  Synthetic oligonucleotide
ttctcgaatcaaatca

SEQ ID NO: 3934 - DNA, 16 bp, Artificial sequence
  Synthetic oligonucleotide
gatcaactagtccagc

SEQ ID NO: 3935 - DNA, 16 bp, Artificial sequence
  Synthetic oligonucleotide
ataactactttgctag

SEQ ID NO: 3936 - DNA, 16 bp, Artificial sequence
  Synthetic oligonucleotide
gcataattagtcattt

SEQ ID NO: 3937 - DNA, 16 bp, Artificial sequence
  Synthetic oligonucleotide
ctatcccaaggagccc

SEQ ID NO: 3938 - DNA, 16 bp, Artificial sequence
  Synthetic oligonucleotide
aaaccttacagtggga

SEQ ID NO: 3939 - DNA, 16 bp, Artificial sequence
  Synthetic oligonucleotide
aaggatgattctttgg

SEQ ID NO: 3940 - DNA, 16 bp, Artificial sequence
  Synthetic oligonucleotide
taaggaatggtaaatc

SEQ ID NO: 3941 - DNA, 16 bp, Artificial sequence
  Synthetic oligonucleotide
gctgaccaggcttgcc

SEQ ID NO: 3942 - DNA, 16 bp, Artificial sequence
  Synthetic oligonucleotide
aagtgtacttgtaaac

SEQ ID NO: 3943 - DNA, 16 bp, Artificial sequence
  Synthetic oligonucleotide
gcgaggtggccatttg

SEQ ID NO: 3944 - DNA, 16 bp, Artificial sequence
  Synthetic oligonucleotide
gccggtccccgctatt

SEQ ID NO: 3945 - DNA, 16 bp, Artificial sequence
  Synthetic oligonucleotide
ccgcggcgacttttac

SEQ ID NO: 3946 - DNA, 16 bp, Artificial sequence
  Synthetic oligonucleotide
cttatagaccataaag

SEQ ID NO: 3947 - DNA, 16 bp, Artificial sequence
  Synthetic oligonucleotide
cctcgcccctcatttt

SEQ ID NO: 3948 - DNA, 16 bp, Artificial sequence
  Synthetic oligonucleotide
caggacacgaacccca

SEQ ID NO: 3949 - DNA, 16 bp, Artificial sequence
  Synthetic oligonucleotide
ctctccgcattccgtt

SEQ ID NO: 3950 - DNA, 16 bp, Artificial sequence
  Synthetic oligonucleotide
ccgcccgcgcgggtca

SEQ ID NO: 3951 - DNA, 16 bp, Artificial sequence
  Synthetic oligonucleotide
aagccgacatgggacc

SEQ ID NO: 3952 - DNA, 16 bp, Artificial sequence
  Synthetic oligonucleotide
ccacctagccacaccg

SEQ ID NO: 3953 - DNA, 16 bp, Artificial sequence
  Synthetic oligonucleotide
ctaagtgatcaggagg

SEQ ID NO: 3954 - DNA, 16 bp, Artificial sequence
  Synthetic oligonucleotide
aactgacggtgcagtg

SEQ ID NO: 3955 - DNA, 16 bp, Artificial sequence
  Synthetic oligonucleotide
gtacctagttggtgct

SEQ ID NO: 3956 - DNA, 16 bp, Artificial sequence
  Synthetic oligonucleotide
ctgggtactgagctgt

SEQ ID NO: 3957 - DNA, 16 bp, Artificial sequence
  Synthetic oligonucleotide
tacttgtaaccaccag

SEQ ID NO: 3958 - DNA, 16 bp, Artificial sequence
  Synthetic oligonucleotide
ggaaagcaacgaggca

SEQ ID NO: 3959 - DNA, 16 bp, Artificial sequence
  Synthetic oligonucleotide
cagcttattgtctgca

SEQ ID NO: 3960 - DNA, 16 bp, Artificial sequence
  Synthetic oligonucleotide
cttgtattccctgggc

SEQ ID NO: 3961 - DNA, 16 bp, Artificial sequence
  Synthetic oligonucleotide
aagcccctatcatttg

SEQ ID NO: 3962 - DNA, 16 bp, Artificial sequence
  Synthetic oligonucleotide
acttatacctggagag

SEQ ID NO: 3963 - DNA, 16 bp, Artificial sequence
  Synthetic oligonucleotide
agattaagaccaatga

SEQ ID NO: 3964 - DNA, 16 bp, Artificial sequence
  Synthetic oligonucleotide
gacggtccttctgtat

SEQ ID NO: 3965 - DNA, 16 bp, Artificial sequence
  Synthetic oligonucleotide
ctccactctcttaatc

SEQ ID NO: 3966 - DNA, 16 bp, Artificial sequence
  Synthetic oligonucleotide
cttagacaatggaggt

SEQ ID NO: 3967 - DNA, 16 bp, Artificial sequence
  Synthetic oligonucleotide
cctcccttgtaccacc

SEQ ID NO: 3968 - DNA, 16 bp, Artificial sequence
  Synthetic oligonucleotide
ccactacccatagtga

SEQ ID NO: 3969 - DNA, 16 bp, Artificial sequence
  Synthetic oligonucleotide
attcagttacacacca

SEQ ID NO: 3970 - DNA, 16 bp, Artificial sequence
  Synthetic oligonucleotide
cccagactactagttt

SEQ ID NO: 3971 - DNA, 16 bp, Artificial sequence
  Synthetic oligonucleotide
aaccaatgcccgttta

SEQ ID NO: 3972 - DNA, 16 bp, Artificial sequence
  Synthetic oligonucleotide
gtttggccatagaaaa

SEQ ID NO: 3973 - DNA, 16 bp, Artificial sequence
  Synthetic oligonucleotide
gccactagtgggcaca

SEQ ID NO: 3974 - DNA, 16 bp, Artificial sequence
  Synthetic oligonucleotide
attaacacctcccatt

SEQ ID NO: 3975 - DNA, 16 bp, Artificial sequence
  Synthetic oligonucleotide
ccaatatccaaccttg

SEQ ID NO: 3976 - DNA, 16 bp, Artificial sequence
  Synthetic oligonucleotide
atttacaggctgttat

SEQ ID NO: 3977 - DNA, 16 bp, Artificial sequence
  Synthetic oligonucleotide
caaaaggctggtgcaa

SEQ ID NO: 3978 - DNA, 16 bp, Artificial sequence
  Synthetic oligonucleotide
cagataattcctcgga

SEQ ID NO: 3979 - DNA, 16 bp, Artificial sequence
  Synthetic oligonucleotide
ccccgcgcccctgtca

SEQ ID NO: 3980 - DNA, 16 bp, Artificial sequence
  Synthetic oligonucleotide
aaggtatgctctctat

SEQ ID NO: 3981 - DNA, 16 bp, Artificial sequence
  Synthetic oligonucleotide
cattccgcagacttgg

SEQ ID NO: 3982 - DNA, 16 bp, Artificial sequence
  Synthetic oligonucleotide
taggcaggagattaag

SEQ ID NO: 3983 - DNA, 16 bp, Artificial sequence
  Synthetic oligonucleotide
atctccttgcataatt

SEQ ID NO: 3984 - DNA, 16 bp, Artificial sequence
  Synthetic oligonucleotide
gaataatacatggtgc

SEQ ID NO: 3985 - DNA, 16 bp, Artificial sequence
  Synthetic oligonucleotide
caacggaggacaggac

SEQ ID NO: 3986 - DNA, 16 bp, Artificial sequence
  Synthetic oligonucleotide
ttgccgggcatgcacg

SEQ ID NO: 3987 - DNA, 16 bp, Artificial sequence
  Synthetic oligonucleotide
tcacctaggcagtgga

SEQ ID NO: 3988 - DNA, 16 bp, Artificial sequence
  Synthetic oligonucleotide
atccgtccctaacaaa

SEQ ID NO: 3989 - DNA, 16 bp, Artificial sequence
  Synthetic oligonucleotide
gtagctaacagtattg

SEQ ID NO: 3990 - DNA, 16 bp, Artificial sequence
  Synthetic oligonucleotide
ccacacggactctcat

SEQ ID NO: 3991 - DNA, 16 bp, Artificial sequence
  Synthetic oligonucleotide
tgagagtgattagagc

SEQ ID NO: 3992 - DNA, 16 bp, Artificial sequence
  Synthetic oligonucleotide
agcaaccagtaggtgg

SEQ ID NO: 3993 - DNA, 16 bp, Artificial sequence
  Synthetic oligonucleotide
cccgatttcactgact

SEQ ID NO: 3994 - DNA, 16 bp, Artificial sequence
  Synthetic oligonucleotide
gcgggttaattgttga

SEQ ID NO: 3995 - DNA, 16 bp, Artificial sequence
  Synthetic oligonucleotide
agtatgccgtgtggga

SEQ ID NO: 3996 - DNA, 16 bp, Artificial sequence
  Synthetic oligonucleotide
ctatggtccccctaac

SEQ ID NO: 3997 - DNA, 16 bp, Artificial sequence
  Synthetic oligonucleotide
caccccggatgctgac

SEQ ID NO: 3998 - DNA, 16 bp, Artificial sequence
  Synthetic oligonucleotide
cattcctgttgatacg

SEQ ID NO: 3999 - DNA, 16 bp, Artificial sequence
  Synthetic oligonucleotide
tctctagttcgcatca

SEQ ID NO: 4000 - DNA, 16 bp, Artificial sequence
  Synthetic oligonucleotide
gttaactgttcctaga

SEQ ID NO: 4001 - DNA, 16 bp, Artificial sequence
  Synthetic oligonucleotide
gatttgaaaggagctg

SEQ ID NO: 4002 - DNA, 16 bp, Artificial sequence
  Synthetic oligonucleotide
agatagatatcctgag

SEQ ID NO: 4003 - DNA, 16 bp, Artificial sequence
  Synthetic oligonucleotide
gaggattcgccactta

SEQ ID NO: 4004 - DNA, 16 bp, Artificial sequence
  Synthetic oligonucleotide
tgatatttggatcttg

SEQ ID NO: 4005 - DNA, 16 bp, Artificial sequence
  Synthetic oligonucleotide
tgtaaaatccagagcc

SEQ ID NO: 4006 - DNA, 16 bp, Artificial sequence
  Synthetic oligonucleotide
attgtacgatgaagga

SEQ ID NO: 4007 - DNA, 16 bp, Artificial sequence
  Synthetic oligonucleotide
aaaataatgattcgag

SEQ ID NO: 4008 - DNA, 16 bp, Artificial sequence
  Synthetic oligonucleotide
agagtaaggtgcacac

SEQ ID NO: 4009 - DNA, 16 bp, Artificial sequence
  Synthetic oligonucleotide
actttggaagcataca

SEQ ID NO: 4010 - DNA, 16 bp, Artificial sequence
  Synthetic oligonucleotide
ttatttctcgaatcaa

SEQ ID NO: 4011 - DNA, 16 bp, Artificial sequence
  Synthetic oligonucleotide
acctaagatgtttcca

SEQ ID NO: 4012 - DNA, 16 bp, Artificial sequence
  Synthetic oligonucleotide
cctgataactactttg

SEQ ID NO: 4013 - DNA, 16 bp, Artificial sequence
  Synthetic oligonucleotide
aatgatatctccttgc

SEQ ID NO: 4014 - DNA, 16 bp, Artificial sequence
  Synthetic oligonucleotide
gatgaaggtactggct

SEQ ID NO: 4015 - DNA, 16 bp, Artificial sequence
  Synthetic oligonucleotide
atagatggctataggt

SEQ ID NO: 4016 - DNA, 16 bp, Artificial sequence
  Synthetic oligonucleotide
aatagatgtaccctga

SEQ ID NO: 4017 - DNA, 16 bp, Artificial sequence
  Synthetic oligonucleotide
ggtacaaaagcagtta

SEQ ID NO: 4018 - DNA, 16 bp, Artificial sequence
  Synthetic oligonucleotide
cagaggaagtgctact

SEQ ID NO: 4019 - DNA, 16 bp, Artificial sequence
  Synthetic oligonucleotide
cgtgttatcagattaa

SEQ ID NO: 4020 - DNA, 16 bp, Artificial sequence
  Synthetic oligonucleotide
gcagtcgggcttggct

SEQ ID NO: 4021 - DNA, 16 bp, Artificial sequence
  Synthetic oligonucleotide
gcgccggtccccgcta

SEQ ID NO: 4022 - DNA, 16 bp, Artificial sequence
  Synthetic oligonucleotide
aaaaccgcggcgactt

SEQ ID NO: 4023 - DNA, 16 bp, Artificial sequence
  Synthetic oligonucleotide
aggtcttatagaccat

SEQ ID NO: 4024 - DNA, 16 bp, Artificial sequence
  Synthetic oligonucleotide
tgcggtcctcgcccct

SEQ ID NO: 4025 - DNA, 16 bp, Artificial sequence
  Synthetic oligonucleotide
ttgcgctagacccacg

SEQ ID NO: 4026 - DNA, 16 bp, Artificial sequence
  Synthetic oligonucleotide
cagcggcgaggaggct

SEQ ID NO: 4027 - DNA, 16 bp, Artificial sequence
  Synthetic oligonucleotide
gcccgaccgcccgcgc

SEQ ID NO: 4028 - DNA, 16 bp, Artificial sequence
  Synthetic oligonucleotide
gccataaagccgacat

SEQ ID NO: 4029 - DNA, 16 bp, Artificial sequence
  Synthetic oligonucleotide
cccgcatccacctagc

SEQ ID NO: 4030 - DNA, 16 bp, Artificial sequence
  Synthetic oligonucleotide
atcctaagtgatcagg

SEQ ID NO: 4031 - DNA, 16 bp, Artificial sequence
  Synthetic oligonucleotide
tgtaactgacggtgca

SEQ ID NO: 4032 - DNA, 16 bp, Artificial sequence
  Synthetic oligonucleotide
gggtacctagttggtg

SEQ ID NO: 4033 - DNA, 16 bp, Artificial sequence
  Synthetic oligonucleotide
atgcttgggtattact

SEQ ID NO: 4034 - DNA, 16 bp, Artificial sequence
  Synthetic oligonucleotide
gctgagtcactacttg

SEQ ID NO: 4035 - DNA, 16 bp, Artificial sequence
  Synthetic oligonucleotide
cacggaaagcaacgag

SEQ ID NO: 4036 - DNA, 16 bp, Artificial sequence
  Synthetic oligonucleotide
gttcgcaatgagcata

SEQ ID NO: 4037 - DNA, 16 bp, Artificial sequence
  Synthetic oligonucleotide
agatccttgtattccc

SEQ ID NO: 4038 - DNA, 16 bp, Artificial sequence
  Synthetic oligonucleotide
acttaagcccctatca

SEQ ID NO: 4039 - DNA, 16 bp, Artificial sequence
  Synthetic oligonucleotide
ttacttatacctggag

SEQ ID NO: 4040 - DNA, 16 bp, Artificial sequence
  Synthetic oligonucleotide
tccgatgggccttgtt

SEQ ID NO: 4041 - DNA, 16 bp, Artificial sequence
  Synthetic oligonucleotide
cttgacggtccttctg

SEQ ID NO: 4042 - DNA, 16 bp, Artificial sequence
  Synthetic oligonucleotide
tcattcaaagcgacgc

SEQ ID NO: 4043 - DNA, 16 bp, Artificial sequence
  Synthetic oligonucleotide
gcccttagacaatgga

SEQ ID NO: 4044 - DNA, 16 bp, Artificial sequence
  Synthetic oligonucleotide
tctgtacctcccttgt

SEQ ID NO: 4045 - DNA, 16 bp, Artificial sequence
  Synthetic oligonucleotide
gcagagcatgttccac

SEQ ID NO: 4046 - DNA, 16 bp, Artificial sequence
  Synthetic oligonucleotide
cccgcaaatcttctgt

SEQ ID NO: 4047 - DNA, 16 bp, Artificial sequence
  Synthetic oligonucleotide
aaggattccctgatgc

SEQ ID NO: 4048 - DNA, 16 bp, Artificial sequence
  Synthetic oligonucleotide
tacccccaccagtgac

SEQ ID NO: 4049 - DNA, 16 bp, Artificial sequence
  Synthetic oligonucleotide
ctgagtttggccatag

SEQ ID NO: 4050 - DNA, 16 bp, Artificial sequence
  Synthetic oligonucleotide
tagctagagcaaagcc

SEQ ID NO: 4051 - DNA, 16 bp, Artificial sequence
  Synthetic oligonucleotide
gaggcaaagagttatt

SEQ ID NO: 4052 - DNA, 16 bp, Artificial sequence
  Synthetic oligonucleotide
gtggaagttttaagcc

SEQ ID NO: 4053 - DNA, 16 bp, Artificial sequence
  Synthetic oligonucleotide
cagggtaaacaagcat

SEQ ID NO: 4054 - DNA, 16 bp, Artificial sequence
  Synthetic oligonucleotide
caaggacagcgagagg

SEQ ID NO: 4055 - DNA, 16 bp, Artificial sequence
  Synthetic oligonucleotide
taggctcaacatatac

SEQ ID NO: 4056 - DNA, 16 bp, Artificial sequence
  Synthetic oligonucleotide
aaccccgcgcccctgt

SEQ ID NO: 4057 - DNA, 16 bp, Artificial sequence
  Synthetic oligonucleotide
ttagagcccaaagtaa

SEQ ID NO: 4058 - DNA, 16 bp, Artificial sequence
  Synthetic oligonucleotide
ctaatcattccgcaga

SEQ ID NO: 4059 - DNA, 16 bp, Artificial sequence
  Synthetic oligonucleotide
gagggaacttgaagac

SEQ ID NO: 4060 - DNA, 16 bp, Artificial sequence
  Synthetic oligonucleotide
gatatctccttgcata

SEQ ID NO: 4061 - DNA, 16 bp, Artificial sequence
  Synthetic oligonucleotide
atagtacaggcttgta

SEQ ID NO: 4062 - DNA, 16 bp, Artificial sequence
  Synthetic oligonucleotide
ctgggattaacaacgg

SEQ ID NO: 4063 - DNA, 16 bp, Artificial sequence
  Synthetic oligonucleotide
gaggcatttgccgggc

SEQ ID NO: 4064 - DNA, 16 bp, Artificial sequence
  Synthetic oligonucleotide
agtcacctaggcagtg

SEQ ID NO: 4065 - DNA, 16 bp, Artificial sequence
  Synthetic oligonucleotide
aatcatccgtccctaa

SEQ ID NO: 4066 - DNA, 16 bp, Artificial sequence
  Synthetic oligonucleotide
agagtaagtagctaac

SEQ ID NO: 4067 - DNA, 16 bp, Artificial sequence
  Synthetic oligonucleotide
gagaagccacacggac

SEQ ID NO: 4068 - DNA, 16 bp, Artificial sequence
  Synthetic oligonucleotide
catgagagtgattaga

SEQ ID NO: 4069 - DNA, 16 bp, Artificial sequence
  Synthetic oligonucleotide
gtaagtggactgtgac

SEQ ID NO: 4070 - DNA, 16 bp, Artificial sequence
  Synthetic oligonucleotide
ctccccgatttcactg

SEQ ID NO: 4071 - DNA, 16 bp, Artificial sequence
  Synthetic oligonucleotide
ttgcgggttaattgtt

SEQ ID NO: 4072 - DNA, 16 bp, Artificial sequence
  Synthetic oligonucleotide
ccagtatgccgtgtgg

SEQ ID NO: 4073 - DNA, 16 bp, Artificial sequence
  Synthetic oligonucleotide
gcctatggtcccccta

SEQ ID NO: 4074 - DNA, 16 bp, Artificial sequence
  Synthetic oligonucleotide
gccaccccggatgctg

SEQ ID NO: 4075 - DNA, 16 bp, Artificial sequence
  Synthetic oligonucleotide
tcattcctgttgatac

SEQ ID NO: 4076 - DNA, 16 bp, Artificial sequence
  Synthetic oligonucleotide
taggttaactgttcct

SEQ ID NO: 4077 - DNA, 16 bp, Artificial sequence
  Synthetic oligonucleotide
cgatttgaaaggagct

SEQ ID NO: 4078 - DNA, 16 bp, Artificial sequence
  Synthetic oligonucleotide
ttagctatcataccac

SEQ ID NO: 4079 - DNA, 16 bp, Artificial sequence
  Synthetic oligonucleotide
ttgttaaactcaatca

SEQ ID NO: 4080 - DNA, 16 bp, Artificial sequence
  Synthetic oligonucleotide
cttgatatttggatct

SEQ ID NO: 4081 - DNA, 16 bp, Artificial sequence
  Synthetic oligonucleotide
tatagattccaggtca

SEQ ID NO: 4082 - DNA, 16 bp, Artificial sequence
  Synthetic oligonucleotide
ttggaagacttactcc

SEQ ID NO: 4083 - DNA, 16 bp, Artificial sequence
  Synthetic oligonucleotide
gaaaataatgattcga

SEQ ID NO: 4084 - DNA, 16 bp, Artificial sequence
  Synthetic oligonucleotide
aagagtaaggtgcaca

SEQ ID NO: 4085 - DNA, 16 bp, Artificial sequence
  Synthetic oligonucleotide
tagacatacaaagctt

SEQ ID NO: 4086 - DNA, 16 bp, Artificial sequence
  Synthetic oligonucleotide
agttatttctcgaatc

SEQ ID NO: 4087 - DNA, 16 bp, Artificial sequence
  Synthetic oligonucleotide
attaggttaactgttc

SEQ ID NO: 4088 - DNA, 16 bp, Artificial sequence
  Synthetic oligonucleotide
acctgataactacttt

SEQ ID NO: 4089 - DNA, 16 bp, Artificial sequence
  Synthetic oligonucleotide
tagaaatgatatctcc

SEQ ID NO: 4090 - DNA, 16 bp, Artificial sequence
  Synthetic oligonucleotide
cgaaacagctcagcag

SEQ ID NO: 4091 - DNA, 16 bp, Artificial sequence
  Synthetic oligonucleotide
gtctagattaatttct

SEQ ID NO: 4092 - DNA, 16 bp, Artificial sequence
  Synthetic oligonucleotide
attacaagattgtctg

SEQ ID NO: 4093 - DNA, 16 bp, Artificial sequence
  Synthetic oligonucleotide
ccgtaagaaaaatgtg

SEQ ID NO: 4094 - DNA, 16 bp, Artificial sequence
  Synthetic oligonucleotide
caggtaaacccaaccc

SEQ ID NO: 4095 - DNA, 16 bp, Artificial sequence
  Synthetic oligonucleotide
tacggtaagtaaaaat

SEQ ID NO: 4096 - DNA, 16 bp, Artificial sequence
  Synthetic oligonucleotide
cgaataagctctaggc

SEQ ID NO: 4097 - DNA, 16 bp, Artificial sequence
  Synthetic oligonucleotide
ccccgcgccggtcccc

SEQ ID NO: 4098 - DNA, 16 bp, Artificial sequence
  Synthetic oligonucleotide
cctgcaaaaccgcggc

SEQ ID NO: 4099 - DNA, 16 bp, Artificial sequence
  Synthetic oligonucleotide
gtaaggtcttatagac

SEQ ID NO: 4100 - DNA, 16 bp, Artificial sequence
  Synthetic oligonucleotide
taatgcggtcctcgcc

SEQ ID NO: 4101 - DNA, 16 bp, Artificial sequence
  Synthetic oligonucleotide
gctcttgcgctagacc

SEQ ID NO: 4102 - DNA, 16 bp, Artificial sequence
  Synthetic oligonucleotide
agccgtggcatgcggt

SEQ ID NO: 4103 - DNA, 16 bp, Artificial sequence
  Synthetic oligonucleotide
cagcccgaccgcccgc

SEQ ID NO: 4104 - DNA, 16 bp, Artificial sequence
  Synthetic oligonucleotide
atgccataaagccgac

SEQ ID NO: 4105 - DNA, 16 bp, Artificial sequence
  Synthetic oligonucleotide
gcacccgcatccacct

SEQ ID NO: 4106 - DNA, 16 bp, Artificial sequence
  Synthetic oligonucleotide
aaaaagcattatccta

SEQ ID NO: 4107 - DNA, 16 bp, Artificial sequence
  Synthetic oligonucleotide
ccatgtaactgacggt

SEQ ID NO: 4108 - DNA, 16 bp, Artificial sequence
  Synthetic oligonucleotide
ttgggtacctagttgg

SEQ ID NO: 4109 - DNA, 16 bp, Artificial sequence
  Synthetic oligonucleotide
taatgcttcagctggg

SEQ ID NO: 4110 - DNA, 16 bp, Artificial sequence
  Synthetic oligonucleotide
cttttcgggctgagtc

SEQ ID NO: 4111 - DNA, 16 bp, Artificial sequence
  Synthetic oligonucleotide
ctcacggaaagcaacg

SEQ ID NO: 4112 - DNA, 16 bp, Artificial sequence
  Synthetic oligonucleotide
tggttcgcaatgagca

SEQ ID NO: 4113 - DNA, 16 bp, Artificial sequence
  Synthetic oligonucleotide
ccagatccttgtattc

SEQ ID NO: 4114 - DNA, 16 bp, Artificial sequence
  Synthetic oligonucleotide
ctacctacttccagac

SEQ ID NO: 4115 - DNA, 16 bp, Artificial sequence
  Synthetic oligonucleotide
acttacttatacctgg

SEQ ID NO: 4116 - DNA, 16 bp, Artificial sequence
  Synthetic oligonucleotide
gattccgatgggcctt

SEQ ID NO: 4117 - DNA, 16 bp, Artificial sequence
  Synthetic oligonucleotide
cccagcgatcttgcac

SEQ ID NO: 4118 - DNA, 16 bp, Artificial sequence
  Synthetic oligonucleotide
gattgtatgagtttgc

SEQ ID NO: 4119 - DNA, 16 bp, Artificial sequence
  Synthetic oligonucleotide
ctgcccttagacaatg

SEQ ID NO: 4120 - DNA, 16 bp, Artificial sequence
  Synthetic oligonucleotide
cattccgtcctctgta

SEQ ID NO: 4121 - DNA, 16 bp, Artificial sequence
  Synthetic oligonucleotide
attggatcaccctatt

SEQ ID NO: 4122 - DNA, 16 bp, Artificial sequence
  Synthetic oligonucleotide
cttcccgcaaatcttc

SEQ ID NO: 4123 - DNA, 16 bp, Artificial sequence
  Synthetic oligonucleotide
cccggtgcagaaaaac

SEQ ID NO: 4124 - DNA, 16 bp, Artificial sequence
  Synthetic oligonucleotide
cacgcattatggaaat

SEQ ID NO: 4125 - DNA, 16 bp, Artificial sequence
  Synthetic oligonucleotide
actgagtttggccata

SEQ ID NO: 4126 - DNA, 16 bp, Artificial sequence
  Synthetic oligonucleotide
tctcaacaggtaatcc

SEQ ID NO: 4127 - DNA, 16 bp, Artificial sequence
  Synthetic oligonucleotide
gagggtaaatcacaga

SEQ ID NO: 4128 - DNA, 16 bp, Artificial sequence
  Synthetic oligonucleotide
cttatgttgagtacct

SEQ ID NO: 4129 - DNA, 16 bp, Artificial sequence
  Synthetic oligonucleotide
gatagtgcaaataacc

SEQ ID NO: 4130 - DNA, 16 bp, Artificial sequence
  Synthetic oligonucleotide
tacacaaggacagcga

SEQ ID NO: 4131 - DNA, 16 bp, Artificial sequence
  Synthetic oligonucleotide
taaatctctagttcgc

SEQ ID NO: 4132 - DNA, 16 bp, Artificial sequence
  Synthetic oligonucleotide
gatgtaggctcaacat

SEQ ID NO: 4133 - DNA, 16 bp, Artificial sequence
  Synthetic oligonucleotide
ttaaccccgcgcccct

SEQ ID NO: 4134 - DNA, 16 bp, Artificial sequence
  Synthetic oligonucleotide
gctgttagagcccaaa

SEQ ID NO: 4135 - DNA, 16 bp, Artificial sequence
  Synthetic oligonucleotide
ctactaaactaatcat

SEQ ID NO: 4136 - DNA, 16 bp, Artificial sequence
  Synthetic oligonucleotide
taggactctgcacact

SEQ ID NO: 4137 - DNA, 16 bp, Artificial sequence
  Synthetic oligonucleotide
agggtaactcttcact

SEQ ID NO: 4138 - DNA, 16 bp, Artificial sequence
  Synthetic oligonucleotide
aaggagcccattcaac

SEQ ID NO: 4139 - DNA, 16 bp, Artificial sequence
  Synthetic oligonucleotide
gactgggattaacaac

SEQ ID NO: 4140 - DNA, 16 bp, Artificial sequence
  Synthetic oligonucleotide
gcattggagaggcatt

SEQ ID NO: 4141 - DNA, 16 bp, Artificial sequence
  Synthetic oligonucleotide
cagagtcacctaggca

SEQ ID NO: 4142 - DNA, 16 bp, Artificial sequence
  Synthetic oligonucleotide
ataatcatccgtccct

SEQ ID NO: 4143 - DNA, 16 bp, Artificial sequence
  Synthetic oligonucleotide
cagcgatgtctcagaa

SEQ ID NO: 4144 - DNA, 16 bp, Artificial sequence
  Synthetic oligonucleotide
agagcatagacgggcg

SEQ ID NO: 4145 - DNA, 16 bp, Artificial sequence
  Synthetic oligonucleotide
ctcctttaacagtgac

SEQ ID NO: 4146 - DNA, 16 bp, Artificial sequence
  Synthetic oligonucleotide
cccctagtaagtggac

SEQ ID NO: 4147 - DNA, 16 bp, Artificial sequence
  Synthetic oligonucleotide
tactccccgatttcac

SEQ ID NO: 4148 - DNA, 16 bp, Artificial sequence
  Synthetic oligonucleotide
atcattgcgggttaat

SEQ ID NO: 4149 - DNA, 16 bp, Artificial sequence
  Synthetic oligonucleotide
aaatccagtatgccgt

SEQ ID NO: 4150 - DNA, 16 bp, Artificial sequence
  Synthetic oligonucleotide
aggattaagctccatg

SEQ ID NO: 4151 - DNA, 16 bp, Artificial sequence
  Synthetic oligonucleotide
ctccgccaccccggat

SEQ ID NO: 4152 - DNA, 16 bp, Artificial sequence
  Synthetic oligonucleotide
ttcattcctgttgata

SEQ ID NO: 4153 - DNA, 16 bp, Artificial sequence
  Synthetic oligonucleotide
tacgatttgaaaggag

SEQ ID NO: 4154 - DNA, 16 bp, Artificial sequence
  Synthetic oligonucleotide
gtaactgacggtgcag

SEQ ID NO: 4155 - DNA, 16 bp, Artificial sequence
  Synthetic oligonucleotide
attgttaaactcaatc

SEQ ID NO: 4156 - DNA, 16 bp, Artificial sequence
  Synthetic oligonucleotide
ccagtattctgaccca

SEQ ID NO: 4157 - DNA, 16 bp, Artificial sequence
  Synthetic oligonucleotide
aaagactatagattcc

SEQ ID NO: 4158 - DNA, 16 bp, Artificial sequence
  Synthetic oligonucleotide
tctctaagaattgctc

SEQ ID NO: 4159 - DNA, 16 bp, Artificial sequence
  Synthetic oligonucleotide
agaaaataatgattcg

SEQ ID NO: 4160 - DNA, 16 bp, Artificial sequence
  Synthetic oligonucleotide
ctttgaaaggtctcca

SEQ ID NO: 4161 - DNA, 16 bp, Artificial sequence
  Synthetic oligonucleotide
tatcatagaagtatga

SEQ ID NO: 4162 - DNA, 16 bp, Artificial sequence
  Synthetic oligonucleotide
taagttatttctcgaa

SEQ ID NO: 4163 - DNA, 16 bp, Artificial sequence
  Synthetic oligonucleotide
gaattttaagggtgca

SEQ ID NO: 4164 - DNA, 16 bp, Artificial sequence
  Synthetic oligonucleotide
acctattggtggaaga

SEQ ID NO: 4165 - DNA, 16 bp, Artificial sequence
  Synthetic oligonucleotide
gtacctagaaatgata

SEQ ID NO: 4166 - DNA, 16 bp, Artificial sequence
  Synthetic oligonucleotide
ccgaaacagctcagca

SEQ ID NO: 4167 - DNA, 16 bp, Artificial sequence
  Synthetic oligonucleotide
agttttattcaggctc

SEQ ID NO: 4168 - DNA, 16 bp, Artificial sequence
  Synthetic oligonucleotide
ttattacaagattgtc

SEQ ID NO: 4169 - DNA, 16 bp, Artificial sequence
  Synthetic oligonucleotide
atgtaaaacctgcccc

SEQ ID NO: 4170 - DNA, 16 bp, Artificial sequence
  Synthetic oligonucleotide
gccagacaggtaaacc

SEQ ID NO: 4171 - DNA, 16 bp, Artificial sequence
  Synthetic oligonucleotide
cttacggtaagtaaaa

SEQ ID NO: 4172 - DNA, 16 bp, Artificial sequence
  Synthetic oligonucleotide
ccaccgaataagctct

SEQ ID NO: 4173 - DNA, 16 bp, Artificial sequence
  Synthetic oligonucleotide
tgccccgcgccggtcc

SEQ ID NO: 4174 - DNA, 16 bp, Artificial sequence
  Synthetic oligonucleotide
agtcggtccctgcaaa

SEQ ID NO: 4175 - DNA, 16 bp, Artificial sequence
  Synthetic oligonucleotide
ccctgtaaggtcttat

SEQ ID NO: 4176 - DNA, 16 bp, Artificial sequence
  Synthetic oligonucleotide
ccaagtaatgcggtcc

SEQ ID NO: 4177 - DNA, 16 bp, Artificial sequence
  Synthetic oligonucleotide
gcgcgcttccccaggc

SEQ ID NO: 4178 - DNA, 16 bp, Artificial sequence
  Synthetic oligonucleotide
cctggagacagccgtg

SEQ ID NO: 4179 - DNA, 16 bp, Artificial sequence
  Synthetic oligonucleotide
cccgcagcccgaccgc

SEQ ID NO: 4180 - DNA, 16 bp, Artificial sequence
  Synthetic oligonucleotide
tactaacaatgtgttg

SEQ ID NO: 4181 - DNA, 16 bp, Artificial sequence
  Synthetic oligonucleotide
aagcacccgcatccac

SEQ ID NO: 4182 - DNA, 16 bp, Artificial sequence
  Synthetic oligonucleotide
ttcaatcacaaaaagc

SEQ ID NO: 4183 - DNA, 16 bp, Artificial sequence
  Synthetic oligonucleotide
atgctaggtggcatca

SEQ ID NO: 4184 - DNA, 16 bp, Artificial sequence
  Synthetic oligonucleotide
tgccttgggtacctag

SEQ ID NO: 4185 - DNA, 16 bp, Artificial sequence
  Synthetic oligonucleotide
ctgtggttcaaggaat

SEQ ID NO: 4186 - DNA, 16 bp, Artificial sequence
  Synthetic oligonucleotide
ctgcccttttcgggct

SEQ ID NO: 4187 - DNA, 16 bp, Artificial sequence
  Synthetic oligonucleotide
tgattgtgagagctga

SEQ ID NO: 4188 - DNA, 16 bp, Artificial sequence
  Synthetic oligonucleotide
caaatcgatgtcaata

SEQ ID NO: 4189 - DNA, 16 bp, Artificial sequence
  Synthetic oligonucleotide
cgggaccatcaaggca

SEQ ID NO: 4190 - DNA, 16 bp, Artificial sequence
  Synthetic oligonucleotide
ccatacctctctcagg

SEQ ID NO: 4191 - DNA, 16 bp, Artificial sequence
  Synthetic oligonucleotide
agacttacttatacct

SEQ ID NO: 4192 - DNA, 16 bp, Artificial sequence
  Synthetic oligonucleotide
tcaggtagattccgat

SEQ ID NO: 4193 - DNA, 16 bp, Artificial sequence
  Synthetic oligonucleotide
tcaactacgccaagct

SEQ ID NO: 4194 - DNA, 16 bp, Artificial sequence
  Synthetic oligonucleotide
cagattgtatgagttt

SEQ ID NO: 4195 - DNA, 16 bp, Artificial sequence
  Synthetic oligonucleotide
tgcaggtactgccctt

SEQ ID NO: 4196 - DNA, 16 bp, Artificial sequence
  Synthetic oligonucleotide
tgacaacacattccgt

SEQ ID NO: 4197 - DNA, 16 bp, Artificial sequence
  Synthetic oligonucleotide
ccattggatcacccta

SEQ ID NO: 4198 - DNA, 16 bp, Artificial sequence
  Synthetic oligonucleotide
tacaccttcccgcaaa

SEQ ID NO: 4199 - DNA, 16 bp, Artificial sequence
  Synthetic oligonucleotide
gacccggtgcagaaaa

SEQ ID NO: 4200 - DNA, 16 bp, Artificial sequence
  Synthetic oligonucleotide
aagaacacgcattatg

SEQ ID NO: 4201 - DNA, 16 bp, Artificial sequence
  Synthetic oligonucleotide
cactgagtttggccat

SEQ ID NO: 4202 - DNA, 16 bp, Artificial sequence
  Synthetic oligonucleotide
tgggcggctctctcaa

SEQ ID NO: 4203 - DNA, 16 bp, Artificial sequence
  Synthetic oligonucleotide
ggacagttgcaagagt

SEQ ID NO: 4204 - DNA, 16 bp, Artificial sequence
  Synthetic oligonucleotide
ccccacccaatttgca

SEQ ID NO: 4205 - DNA, 16 bp, Artificial sequence
  Synthetic oligonucleotide
tgttaaaggatagtgc

SEQ ID NO: 4206 - DNA, 16 bp, Artificial sequence
  Synthetic oligonucleotide
cattgatcaaaagcta

SEQ ID NO: 4207 - DNA, 16 bp, Artificial sequence
  Synthetic oligonucleotide
catagtgttggctatt

SEQ ID NO: 4208 - DNA, 16 bp, Artificial sequence
  Synthetic oligonucleotide
agaaatgatgtaggct

SEQ ID NO: 4209 - DNA, 16 bp, Artificial sequence
  Synthetic oligonucleotide
ccttaaccccgcgccc

SEQ ID NO: 4210 - DNA, 16 bp, Artificial sequence
  Synthetic oligonucleotide
ttaagggtgcaaatta

SEQ ID NO: 4211 - DNA, 16 bp, Artificial sequence
  Synthetic oligonucleotide
tcacgggaatggctgt

SEQ ID NO: 4212 - DNA, 16 bp, Artificial sequence
  Synthetic oligonucleotide
cttctactaaactaat

SEQ ID NO: 4213 - DNA, 16 bp, Artificial sequence
  Synthetic oligonucleotide
gagctaatgtaagatg

SEQ ID NO: 4214 - DNA, 16 bp, Artificial sequence
  Synthetic oligonucleotide
gtaagggtaactcttc

SEQ ID NO: 4215 - DNA, 16 bp, Artificial sequence
  Synthetic oligonucleotide
gaaggtactggctatc

SEQ ID NO: 4216 - DNA, 16 bp, Artificial sequence
  Synthetic oligonucleotide
gatcttgactgggatt

SEQ ID NO: 4217 - DNA, 16 bp, Artificial sequence
  Synthetic oligonucleotide
cagagattctagtggt

SEQ ID NO: 4218 - DNA, 16 bp, Artificial sequence
  Synthetic oligonucleotide
cccaaccctaaatgca

SEQ ID NO: 4219 - DNA, 16 bp, Artificial sequence
  Synthetic oligonucleotide
tccataatcatccgtc

SEQ ID NO: 4220 - DNA, 16 bp, Artificial sequence
  Synthetic oligonucleotide
cacagcgatgtctcag

SEQ ID NO: 4221 - DNA, 16 bp, Artificial sequence
  Synthetic oligonucleotide
ccaagagcatagacgg

SEQ ID NO: 4222 - DNA, 16 bp, Artificial sequence
  Synthetic oligonucleotide
aagtcttaagctcctt

SEQ ID NO: 4223 - DNA, 16 bp, Artificial sequence
  Synthetic oligonucleotide
aatacccctagtaagt

SEQ ID NO: 4224 - DNA, 16 bp, Artificial sequence
  Synthetic oligonucleotide
gaccagctactccccg

SEQ ID NO: 4225 - DNA, 16 bp, Artificial sequence
  Synthetic oligonucleotide
cgaaatcattgcgggt

SEQ ID NO: 4226 - DNA, 16 bp, Artificial sequence
  Synthetic oligonucleotide
tccccccacaaggagg

SEQ ID NO: 4227 - DNA, 16 bp, Artificial sequence
  Synthetic oligonucleotide
cacgccatggtaaaag

SEQ ID NO: 4228 - DNA, 16 bp, Artificial sequence
  Synthetic oligonucleotide
ctctccgccaccccgg

SEQ ID NO: 4229 - DNA, 16 bp, Artificial sequence
  Synthetic oligonucleotide
agtgatttgctgacct

SEQ ID NO: 4230 - DNA, 16 bp, Artificial sequence
  Synthetic oligonucleotide
aatacatagtgttggc

SEQ ID NO: 4231 - DNA, 16 bp, Artificial sequence
  Synthetic oligonucleotide
tccagattgcagtttc

SEQ ID NO: 4232 - DNA, 16 bp, Artificial sequence
  Synthetic oligonucleotide
tcaacagcaaccccca

SEQ ID NO: 4233 - DNA, 16 bp, Artificial sequence
  Synthetic oligonucleotide
ttacgatttgaaagga

SEQ ID NO: 4234 - DNA, 16 bp, Artificial sequence
  Synthetic oligonucleotide
aatagcttcaagtccc

SEQ ID NO: 4235 - DNA, 16 bp, Artificial sequence
  Synthetic oligonucleotide
caattgttaaactcaa

SEQ ID NO: 4236 - DNA, 16 bp, Artificial sequence
  Synthetic oligonucleotide
agtttatcaactacct

SEQ ID NO: 4237 - DNA, 16 bp, Artificial sequence
  Synthetic oligonucleotide
aaagatcaacatccac

SEQ ID NO: 4238 - DNA, 16 bp, Artificial sequence
  Synthetic oligonucleotide
cttgttggaaaactct

SEQ ID NO: 4239 - DNA, 16 bp, Artificial sequence
  Synthetic oligonucleotide
gcaaaacaagtcagct

SEQ ID NO: 4240 - DNA, 16 bp, Artificial sequence
  Synthetic oligonucleotide
atggtatatcctcaca

SEQ ID NO: 4241 - DNA, 16 bp, Artificial sequence
  Synthetic oligonucleotide
accaatgagtcaagat

SEQ ID NO: 4242 - DNA, 16 bp, Artificial sequence
  Synthetic oligonucleotide
ataagttatttctcga

SEQ ID NO: 4243 - DNA, 16 bp, Artificial sequence
  Synthetic oligonucleotide
agaattttaagggtgc

SEQ ID NO: 4244 - DNA, 16 bp, Artificial sequence
  Synthetic oligonucleotide
actacctattggtgga

SEQ ID NO: 4245 - DNA, 16 bp, Artificial sequence
  Synthetic oligonucleotide
cgtacctagaaatgat

SEQ ID NO: 4246 - DNA, 16 bp, Artificial sequence
  Synthetic oligonucleotide
aagccgaaacagctca

SEQ ID NO: 4247 - DNA, 16 bp, Artificial sequence
  Synthetic oligonucleotide
tagttttattcaggct

SEQ ID NO: 4248 - DNA, 16 bp, Artificial sequence
  Synthetic oligonucleotide
tatgattgttgtcatg

SEQ ID NO: 4249 - DNA, 16 bp, Artificial sequence
  Synthetic oligonucleotide
ataaccacccaggtca

SEQ ID NO: 4250 - DNA, 16 bp, Artificial sequence
  Synthetic oligonucleotide
atattcttacggtaag

SEQ ID NO: 4251 - DNA, 16 bp, Artificial sequence
  Synthetic oligonucleotide
actaccaccgaataag

SEQ ID NO: 4252 - DNA, 16 bp, Artificial sequence
  Synthetic oligonucleotide
gccggacacacctgcc

SEQ ID NO: 4253 - DNA, 16 bp, Artificial sequence
  Synthetic oligonucleotide
aaagtcggtccctgca

SEQ ID NO: 4254 - DNA, 16 bp, Artificial sequence
  Synthetic oligonucleotide
ctatccagacaccagc

SEQ ID NO: 4255 - DNA, 16 bp, Artificial sequence
  Synthetic oligonucleotide
gcaggacatttatccc

SEQ ID NO: 4256 - DNA, 16 bp, Artificial sequence
  Synthetic oligonucleotide
ccgcgcgcttccccag

SEQ ID NO: 4257 - DNA, 16 bp, Artificial sequence
  Synthetic oligonucleotide
gatttccgtctgagac

SEQ ID NO: 4258 - DNA, 16 bp, Artificial sequence
  Synthetic oligonucleotide
gcgcccgcagcccgac

SEQ ID NO: 4259 - DNA, 16 bp, Artificial sequence
  Synthetic oligonucleotide
agtggaagctttacta

SEQ ID NO: 4260 - DNA, 16 bp, Artificial sequence
  Synthetic oligonucleotide
aaaagcacccgcatcc

SEQ ID NO: 4261 - DNA, 16 bp, Artificial sequence
  Synthetic oligonucleotide
cgatatttttttcaat

SEQ ID NO: 4262 - DNA, 16 bp, Artificial sequence
  Synthetic oligonucleotide
gttttgatgctaggtg

SEQ ID NO: 4263 - DNA, 16 bp, Artificial sequence
  Synthetic oligonucleotide
gctgggtgttcctttc

SEQ ID NO: 4264 - DNA, 16 bp, Artificial sequence
  Synthetic oligonucleotide
gcagggttttctactc

SEQ ID NO: 4265 - DNA, 16 bp, Artificial sequence
  Synthetic oligonucleotide
cgggcccaagagtcca

SEQ ID NO: 4266 - DNA, 16 bp, Artificial sequence
  Synthetic oligonucleotide
ccctgattgtgagagc

SEQ ID NO: 4267 - DNA, 16 bp, Artificial sequence
  Synthetic oligonucleotide
cacttgcaacatattc

SEQ ID NO: 4268 - DNA, 16 bp, Artificial sequence
  Synthetic oligonucleotide
caggctcgggaccatc

SEQ ID NO: 4269 - DNA, 16 bp, Artificial sequence
  Synthetic oligonucleotide
ctgcatctctgacaat

SEQ ID NO: 4270 - DNA, 16 bp, Artificial sequence
  Synthetic oligonucleotide
gagaggtctggactca

SEQ ID NO: 4271 - DNA, 16 bp, Artificial sequence
  Synthetic oligonucleotide
agtggatcattcaggt

SEQ ID NO: 4272 - DNA, 16 bp, Artificial sequence
  Synthetic oligonucleotide
cccactagtctgccct

SEQ ID NO: 4273 - DNA, 16 bp, Artificial sequence
  Synthetic oligonucleotide
tccagattgtatgagt

SEQ ID NO: 4274 - DNA, 16 bp, Artificial sequence
  Synthetic oligonucleotide
gcagacccacctgttg

SEQ ID NO: 4275 - DNA, 16 bp, Artificial sequence
  Synthetic oligonucleotide
catgttgacaacacat

SEQ ID NO: 4276 - DNA, 16 bp, Artificial sequence
  Synthetic oligonucleotide
agtgatgactttccat

SEQ ID NO: 4277 - DNA, 16 bp, Artificial sequence
  Synthetic oligonucleotide
gcagacccggtgcaga

SEQ ID NO: 4278 - DNA, 16 bp, Artificial sequence
  Synthetic oligonucleotide
atagagttctcctcct

SEQ ID NO: 4279 - DNA, 16 bp, Artificial sequence
  Synthetic oligonucleotide
acactgagtttggcca

SEQ ID NO: 4280 - DNA, 16 bp, Artificial sequence
  Synthetic oligonucleotide
aaaggcgatgaaggtg

SEQ ID NO: 4281 - DNA, 16 bp, Artificial sequence
  Synthetic oligonucleotide
catatcaagtcccact

SEQ ID NO: 4282 - DNA, 16 bp, Artificial sequence
  Synthetic oligonucleotide
cacgccccacccaatt

SEQ ID NO: 4283 - DNA, 16 bp, Artificial sequence
  Synthetic oligonucleotide
cgctgttaaaggatag

SEQ ID NO: 4284 - DNA, 16 bp, Artificial sequence
  Synthetic oligonucleotide
gccattgatcaaaagc

SEQ ID NO: 4285 - DNA, 16 bp, Artificial sequence
  Synthetic oligonucleotide
cacatgggacagcttt

SEQ ID NO: 4286 - DNA, 16 bp, Artificial sequence
  Synthetic oligonucleotide
acccttaaccccgcgc

SEQ ID NO: 4287 - DNA, 16 bp, Artificial sequence
  Synthetic oligonucleotide
gtaagcagctcatggc

SEQ ID NO: 4288 - DNA, 16 bp, Artificial sequence
  Synthetic oligonucleotide
aaagatcacgggaatg

SEQ ID NO: 4289 - DNA, 16 bp, Artificial sequence
  Synthetic oligonucleotide
tccttctactaaacta

SEQ ID NO: 4290 - DNA, 16 bp, Artificial sequence
  Synthetic oligonucleotide
gacagacatgtaagag

SEQ ID NO: 4291 - DNA, 16 bp, Artificial sequence
  Synthetic oligonucleotide
aaactaaaacgagtga

SEQ ID NO: 4292 - DNA, 16 bp, Artificial sequence
  Synthetic oligonucleotide
tgagttttggcctaaa

SEQ ID NO: 4293 - DNA, 16 bp, Artificial sequence
  Synthetic oligonucleotide
tcagatgatcttgact

SEQ ID NO: 4294 - DNA, 16 bp, Artificial sequence
  Synthetic oligonucleotide
cggagactacacagag

SEQ ID NO: 4295 - DNA, 16 bp, Artificial sequence
  Synthetic oligonucleotide
atggctatgtcagtgg

SEQ ID NO: 4296 - DNA, 16 bp, Artificial sequence
  Synthetic oligonucleotide
catccataatcatccg

SEQ ID NO: 4297 - DNA, 16 bp, Artificial sequence
  Synthetic oligonucleotide
gaacacagcgatgtct

SEQ ID NO: 4298 - DNA, 16 bp, Artificial sequence
  Synthetic oligonucleotide
atgcaccagatgcccc

SEQ ID NO: 4299 - DNA, 16 bp, Artificial sequence
  Synthetic oligonucleotide
gggtaggtctgcaaca

SEQ ID NO: 4300 - DNA, 16 bp, Artificial sequence
  Synthetic oligonucleotide
caaatacccctagtaa

SEQ ID NO: 4301 - DNA, 16 bp, Artificial sequence
  Synthetic oligonucleotide
tgagtggaccagctac

SEQ ID NO: 4302 - DNA, 16 bp, Artificial sequence
  Synthetic oligonucleotide
ggagcgaaatcattgc

SEQ ID NO: 4303 - DNA, 16 bp, Artificial sequence
  Synthetic oligonucleotide
caaactgatggcccca

SEQ ID NO: 4304 - DNA, 16 bp, Artificial sequence
  Synthetic oligonucleotide
agtcacgccatggtaa

SEQ ID NO: 4305 - DNA, 16 bp, Artificial sequence
  Synthetic oligonucleotide
cggccccctctccgcc

SEQ ID NO: 4306 - DNA, 16 bp, Artificial sequence
  Synthetic oligonucleotide
agattaagcactgttc

SEQ ID NO: 4307 - DNA, 16 bp, Artificial sequence
  Synthetic oligonucleotide
ctatattattttacga

SEQ ID NO: 4308 - DNA, 16 bp, Artificial sequence
  Synthetic oligonucleotide
ttaatttgaccctcat

SEQ ID NO: 4309 - DNA, 16 bp, Artificial sequence
  Synthetic oligonucleotide
cttattgtctgcagcc

SEQ ID NO: 4310 - DNA, 16 bp, Artificial sequence
  Synthetic oligonucleotide
agattacaggaaagct

SEQ ID NO: 4311 - DNA, 16 bp, Artificial sequence
  Synthetic oligonucleotide
gtaataagttccccat

SEQ ID NO: 4312 - DNA, 16 bp, Artificial sequence
  Synthetic oligonucleotide
atagtaagctgtctga

SEQ ID NO: 4313 - DNA, 16 bp, Artificial sequence
  Synthetic oligonucleotide
aagctattatctgcca

SEQ ID NO: 4314 - DNA, 16 bp, Artificial sequence
  Synthetic oligonucleotide
tatggtatatcctcac

SEQ ID NO: 4315 - DNA, 16 bp, Artificial sequence
  Synthetic oligonucleotide
aaccaatgagtcaaga

SEQ ID NO: 4316 - DNA, 16 bp, Artificial sequence
  Synthetic oligonucleotide
cataagttatttctcg

SEQ ID NO: 4317 - DNA, 16 bp, Artificial sequence
  Synthetic oligonucleotide
gtaagataaacttgtt

SEQ ID NO: 4318 - DNA, 16 bp, Artificial sequence
  Synthetic oligonucleotide
aaggtgagaatttgtc

SEQ ID NO: 4319 - DNA, 16 bp, Artificial sequence
  Synthetic oligonucleotide
aagggtaactcttcac

SEQ ID NO: 4320 - DNA, 16 bp, Artificial sequence
  Synthetic oligonucleotide
aaagccgaaacagctc

SEQ ID NO: 4321 - DNA, 16 bp, Artificial sequence
  Synthetic oligonucleotide
atagttttattcaggc

SEQ ID NO: 4322 - DNA, 16 bp, Artificial sequence
  Synthetic oligonucleotide
tatatgattgttgtca

SEQ ID NO: 4323 - DNA, 16 bp, Artificial sequence
  Synthetic oligonucleotide
cttatgttgtaaaatt

SEQ ID NO: 4324 - DNA, 16 bp, Artificial sequence
  Synthetic oligonucleotide
ttaatcaataaccacc

SEQ ID NO: 4325 - DNA, 16 bp, Artificial sequence
  Synthetic oligonucleotide
tttacgatttgaaagg

SEQ ID NO: 4326 - DNA, 16 bp, Artificial sequence
  Synthetic oligonucleotide
agactaccaccgaata

SEQ ID NO: 4327 - DNA, 16 bp, Artificial sequence
  Synthetic oligonucleotide
tcttagccggacacac

SEQ ID NO: 4328 - DNA, 16 bp, Artificial sequence
  Synthetic oligonucleotide
atgcgcctcaagaaaa

SEQ ID NO: 4329 - DNA, 16 bp, Artificial sequence
  Synthetic oligonucleotide
ccgctatccagacacc

SEQ ID NO: 4330 - DNA, 16 bp, Artificial sequence
  Synthetic oligonucleotide
cggcaggacatttatc

SEQ ID NO: 4331 - DNA, 16 bp, Artificial sequence
  Synthetic oligonucleotide
caccgcgcgcttcccc

SEQ ID NO: 4332 - DNA, 16 bp, Artificial sequence
  Synthetic oligonucleotide
cccagatttccgtctg

SEQ ID NO: 4333 - DNA, 16 bp, Artificial sequence
  Synthetic oligonucleotide
agcggaaggcccggcc

SEQ ID NO: 4334 - DNA, 16 bp, Artificial sequence
  Synthetic oligonucleotide
gaagttactctgatgg

SEQ ID NO: 4335 - DNA, 16 bp, Artificial sequence
  Synthetic oligonucleotide
gatggcgaaaagcacc

SEQ ID NO: 4336 - DNA, 16 bp, Artificial sequence
  Synthetic oligonucleotide
tcgatatttttttcaa

SEQ ID NO: 4337 - DNA, 16 bp, Artificial sequence
  Synthetic oligonucleotide
aggttttgatgctagg

SEQ ID NO: 4338 - DNA, 16 bp, Artificial sequence
  Synthetic oligonucleotide
atcgctatggcctacc

SEQ ID NO: 4339 - DNA, 16 bp, Artificial sequence
  Synthetic oligonucleotide
tccgggcccaagagtc

SEQ ID NO: 4340 - DNA, 16 bp, Artificial sequence
  Synthetic oligonucleotide
acccagcatgttcagg

SEQ ID NO: 4341 - DNA, 16 bp, Artificial sequence
  Synthetic oligonucleotide
cacatggcgcagtggc

SEQ ID NO: 4342 - DNA, 16 bp, Artificial sequence
  Synthetic oligonucleotide
ctcttcgaccaggctc

SEQ ID NO: 4343 - DNA, 16 bp, Artificial sequence
  Synthetic oligonucleotide
gaaagtgtctgcatct

SEQ ID NO: 4344 - DNA, 16 bp, Artificial sequence
  Synthetic oligonucleotide
aacaggtctgggattc

SEQ ID NO: 4345 - DNA, 16 bp, Artificial sequence
  Synthetic oligonucleotide
ggagtggatcattcag

SEQ ID NO: 4346 - DNA, 16 bp, Artificial sequence
  Synthetic oligonucleotide
ctacttacccctcact

SEQ ID NO: 4347 - DNA, 16 bp, Artificial sequence
  Synthetic oligonucleotide
cacccatagggtcttg

SEQ ID NO: 4348 - DNA, 16 bp, Artificial sequence
  Synthetic oligonucleotide
cccgcccacacactgt

SEQ ID NO: 4349 - DNA, 16 bp, Artificial sequence
  Synthetic oligonucleotide
ctggcatgttgacaac

SEQ ID NO: 4350 - DNA, 16 bp, Artificial sequence
  Synthetic oligonucleotide
atcactatggaaggaa

SEQ ID NO: 4351 - DNA, 16 bp, Artificial sequence
  Synthetic oligonucleotide
cttcggtatagaggaa

SEQ ID NO: 4352 - DNA, 16 bp, Artificial sequence
  Synthetic oligonucleotide
caggcagacccggtgc

SEQ ID NO: 4353 - DNA, 16 bp, Artificial sequence
  Synthetic oligonucleotide
gaattctccccataga

SEQ ID NO: 4354 - DNA, 16 bp, Artificial sequence
  Synthetic oligonucleotide
tctttcaaacggattt

SEQ ID NO: 4355 - DNA, 16 bp, Artificial sequence
  Synthetic oligonucleotide
ggagacaactatgtgc

SEQ ID NO: 4356 - DNA, 16 bp, Artificial sequence
  Synthetic oligonucleotide
attaccagcatggaac

SEQ ID NO: 4357 - DNA, 16 bp, Artificial sequence
  Synthetic oligonucleotide
cgatactcttccccac

SEQ ID NO: 4358 - DNA, 16 bp, Artificial sequence
  Synthetic oligonucleotide
attgggttgtcataat

SEQ ID NO: 4359 - DNA, 16 bp, Artificial sequence
  Synthetic oligonucleotide
aagggctagtggaatt

SEQ ID NO: 4360 - DNA, 16 bp, Artificial sequence
  Synthetic oligonucleotide
cagacaatacatagtg

SEQ ID NO: 4361 - DNA, 16 bp, Artificial sequence
  Synthetic oligonucleotide
gtcaggtagaccaaaa

SEQ ID NO: 4362 - DNA, 16 bp, Artificial sequence
  Synthetic oligonucleotide
tcacccttaaccccgc

SEQ ID NO: 4363 - DNA, 16 bp, Artificial sequence
  Synthetic oligonucleotide
tagtaactgagtaaga

SEQ ID NO: 4364 - DNA, 16 bp, Artificial sequence
  Synthetic oligonucleotide
agggcttatcagaact

SEQ ID NO: 4365 - DNA, 16 bp, Artificial sequence
  Synthetic oligonucleotide
ggagactcatgaacat

SEQ ID NO: 4366 - DNA, 16 bp, Artificial sequence
  Synthetic oligonucleotide
gtccagattgcagttt

SEQ ID NO: 4367 - DNA, 16 bp, Artificial sequence
  Synthetic oligonucleotide
tgctggttcagtcaac

SEQ ID NO: 4368 - DNA, 16 bp, Artificial sequence
  Synthetic oligonucleotide
tgatttgatatcaaac

SEQ ID NO: 4369 - DNA, 16 bp, Artificial sequence
  Synthetic oligonucleotide
gactttgagttttggc

SEQ ID NO: 4370 - DNA, 16 bp, Artificial sequence
  Synthetic oligonucleotide
atcctagagatctgag

SEQ ID NO: 4371 - DNA, 16 bp, Artificial sequence
  Synthetic oligonucleotide
tccggagactacacag

SEQ ID NO: 4372 - DNA, 16 bp, Artificial sequence
  Synthetic oligonucleotide
ttaatggctatgtcag

SEQ ID NO: 4373 - DNA, 16 bp, Artificial sequence
  Synthetic oligonucleotide
cagtgagacatccata

SEQ ID NO: 4374 - DNA, 16 bp, Artificial sequence
  Synthetic oligonucleotide
gtgggaacacagcgat

SEQ ID NO: 4375 - DNA, 16 bp, Artificial sequence
  Synthetic oligonucleotide
gaaatgcaccagatgc

SEQ ID NO: 4376 - DNA, 16 bp, Artificial sequence
  Synthetic oligonucleotide
atgggtaggtctgcaa

SEQ ID NO: 4377 - DNA, 16 bp, Artificial sequence
  Synthetic oligonucleotide
agccaaatacccctag

SEQ ID NO: 4378 - DNA, 16 bp, Artificial sequence
  Synthetic oligonucleotide
gctgagtggaccagct

SEQ ID NO: 4379 - DNA, 16 bp, Artificial sequence
  Synthetic oligonucleotide
tcaggagcgaaatcat

SEQ ID NO: 4380 - DNA, 16 bp, Artificial sequence
  Synthetic oligonucleotide
ctcaaactgatggccc

SEQ ID NO: 4381 - DNA, 16 bp, Artificial sequence
  Synthetic oligonucleotide
ttattggagtcacgcc

SEQ ID NO: 4382 - DNA, 16 bp, Artificial sequence
  Synthetic oligonucleotide
agagcggccccctctc

SEQ ID NO: 4383 - DNA, 16 bp, Artificial sequence
  Synthetic oligonucleotide
cattctatcttatgtt

SEQ ID NO: 4384 - DNA, 16 bp, Artificial sequence
  Synthetic oligonucleotide
acaagattaagcactg

SEQ ID NO: 4385 - DNA, 16 bp, Artificial sequence
  Synthetic oligonucleotide
ataactggtccttccc

SEQ ID NO: 4386 - DNA, 16 bp, Artificial sequence
  Synthetic oligonucleotide
tttattgggttgtcat

SEQ ID NO: 4387 - DNA, 16 bp, Artificial sequence
  Synthetic oligonucleotide
acatcatataaaccag

SEQ ID NO: 4388 - DNA, 16 bp, Artificial sequence
  Synthetic oligonucleotide
tcaacgaggctgcatc

SEQ ID NO: 4389 - DNA, 16 bp, Artificial sequence
  Synthetic oligonucleotide
caatcgctatggccta

SEQ ID NO: 4390 - DNA, 16 bp, Artificial sequence
  Synthetic oligonucleotide
aatggttcgcaatgag

SEQ ID NO: 4391 - DNA, 16 bp, Artificial sequence
  Synthetic oligonucleotide
cagattacaggaaagc

SEQ ID NO: 4392 - DNA, 16 bp, Artificial sequence
  Synthetic oligonucleotide
actattagctcttcaa

SEQ ID NO: 4393 - DNA, 16 bp, Artificial sequence
  Synthetic oligonucleotide
aatagtaagctgtctg

SEQ ID NO: 4394 - DNA, 16 bp, Artificial sequence
  Synthetic oligonucleotide
atgcaagctattatct

SEQ ID NO: 4395 - DNA, 16 bp, Artificial sequence
  Synthetic oligonucleotide
attatggtatatcctc

SEQ ID NO: 4396 - DNA, 16 bp, Artificial sequence
  Synthetic oligonucleotide
tcctaatccatattgc

SEQ ID NO: 4397 - DNA, 16 bp, Artificial sequence
  Synthetic oligonucleotide
gccataagttatttct

SEQ ID NO: 4398 - DNA, 16 bp, Artificial sequence
  Synthetic oligonucleotide
gagtaagataaacttg

SEQ ID NO: 4399 - DNA, 16 bp, Artificial sequence
  Synthetic oligonucleotide
agaatctaggaactgg

SEQ ID NO: 4400 - DNA, 16 bp, Artificial sequence
  Synthetic oligonucleotide
tgagtaagggtaactc

SEQ ID NO: 4401 - DNA, 16 bp, Artificial sequence
  Synthetic oligonucleotide
taaatcgcaataccta

SEQ ID NO: 4402 - DNA, 16 bp, Artificial sequence
  Synthetic oligonucleotide
ctaatcatccaaccaa

SEQ ID NO: 4403 - DNA, 16 bp, Artificial sequence
  Synthetic oligonucleotide
cactttatatgattgt

SEQ ID NO: 4404 - DNA, 16 bp, Artificial sequence
  Synthetic oligonucleotide
tgaacccaatagttta

SEQ ID NO: 4405 - DNA, 16 bp, Artificial sequence
  Synthetic oligonucleotide
catcactctcaatgat

SEQ ID NO: 4406 - DNA, 16 bp, Artificial sequence
  Synthetic oligonucleotide
accagactaccaccga

SEQ ID NO: 4407 - DNA, 16 bp, Artificial sequence
  Synthetic oligonucleotide
cgtcttagccggacac

SEQ ID NO: 4408 - DNA, 16 bp, Artificial sequence
  Synthetic oligonucleotide
taaatgcgcctcaaga

SEQ ID NO: 4409 - DNA, 16 bp, Artificial sequence
  Synthetic oligonucleotide
ttatccgctatccaga

SEQ ID NO: 4410 - DNA, 16 bp, Artificial sequence
  Synthetic oligonucleotide
gccggcaggacattta

SEQ ID NO: 4411 - DNA, 16 bp, Artificial sequence
  Synthetic oligonucleotide
tccaccgcgcgcttcc

SEQ ID NO: 4412 - DNA, 16 bp, Artificial sequence
  Synthetic oligonucleotide
gagtaggtgcccagat

SEQ ID NO: 4413 - DNA, 16 bp, Artificial sequence
  Synthetic oligonucleotide
gcactagcggaaggcc

SEQ ID NO: 4414 - DNA, 16 bp, Artificial sequence
  Synthetic oligonucleotide
ctaatgggctggacag

SEQ ID NO: 4415 - DNA, 16 bp, Artificial sequence
  Synthetic oligonucleotide
gggatggcgaaaagca

SEQ ID NO: 4416 - DNA, 16 bp, Artificial sequence
  Synthetic oligonucleotide
ccaggtcgatattttt

SEQ ID NO: 4417 - DNA, 16 bp, Artificial sequence
  Synthetic oligonucleotide
atcttgcaacaaggaa

SEQ ID NO: 4418 - DNA, 16 bp, Artificial sequence
  Synthetic oligonucleotide
tcaatcgctatggcct

SEQ ID NO: 4419 - DNA, 16 bp, Artificial sequence
  Synthetic oligonucleotide
cttccgggcccaagag

SEQ ID NO: 4420 - DNA, 16 bp, Artificial sequence
  Synthetic oligonucleotide
attaagcctgagtggc

SEQ ID NO: 4421 - DNA, 16 bp, Artificial sequence
  Synthetic oligonucleotide
gcaacccccagagaga

SEQ ID NO: 4422 - DNA, 16 bp, Artificial sequence
  Synthetic oligonucleotide
cctgactcttcgacca

SEQ ID NO: 4423 - DNA, 16 bp, Artificial sequence
  Synthetic oligonucleotide
gctagaaagtgtctgc

SEQ ID NO: 4424 - DNA, 16 bp, Artificial sequence
  Synthetic oligonucleotide
tagatatcccaaggga

SEQ ID NO: 4425 - DNA, 16 bp, Artificial sequence
  Synthetic oligonucleotide
gggaggtgagacttaa

SEQ ID NO: 4426 - DNA, 16 bp, Artificial sequence
  Synthetic oligonucleotide
gattctacttacccct

SEQ ID NO: 4427 - DNA, 16 bp, Artificial sequence
  Synthetic oligonucleotide
taaactcacccatagg

SEQ ID NO: 4428 - DNA, 16 bp, Artificial sequence
  Synthetic oligonucleotide
gtaagtggtcatcttc

SEQ ID NO: 4429 - DNA, 16 bp, Artificial sequence
  Synthetic oligonucleotide
agaaaccctaagggtt

SEQ ID NO: 4430 - DNA, 16 bp, Artificial sequence
  Synthetic oligonucleotide
cccttcggtatagagg

SEQ ID NO: 4431 - DNA, 16 bp, Artificial sequence
  Synthetic oligonucleotide
ttacaggcagacccgg

SEQ ID NO: 4432 - DNA, 16 bp, Artificial sequence
  Synthetic oligonucleotide
aggaattctccccata

SEQ ID NO: 4433 - DNA, 16 bp, Artificial sequence
  Synthetic oligonucleotide
tcaaagcctgcttaac

SEQ ID NO: 4434 - DNA, 16 bp, Artificial sequence
  Synthetic oligonucleotide
cagatggagacaacta

SEQ ID NO: 4435 - DNA, 16 bp, Artificial sequence
  Synthetic oligonucleotide
tgagttaagggctcag

SEQ ID NO: 4436 - DNA, 16 bp, Artificial sequence
  Synthetic oligonucleotide
tggcgatactcttccc

SEQ ID NO: 4437 - DNA, 16 bp, Artificial sequence
  Synthetic oligonucleotide
tcaaagggctagtgga

SEQ ID NO: 4438 - DNA, 16 bp, Artificial sequence
  Synthetic oligonucleotide
aatagatgtcaggtag

SEQ ID NO: 4439 - DNA, 16 bp, Artificial sequence
  Synthetic oligonucleotide
cttcacccttaacccc

SEQ ID NO: 4440 - DNA, 16 bp, Artificial sequence
  Synthetic oligonucleotide
cataccttcaatgctt

SEQ ID NO: 4441 - DNA, 16 bp, Artificial sequence
  Synthetic oligonucleotide
tgaagggcttatcaga

SEQ ID NO: 4442 - DNA, 16 bp, Artificial sequence
  Synthetic oligonucleotide
ccaccctcactttatg

SEQ ID NO: 4443 - DNA, 16 bp, Artificial sequence
  Synthetic oligonucleotide
tgtccagattgcagtt

SEQ ID NO: 4444 - DNA, 16 bp, Artificial sequence
  Synthetic oligonucleotide
acatctagctcttact

SEQ ID NO: 4445 - DNA, 16 bp, Artificial sequence
  Synthetic oligonucleotide
ccactgatgcaatgga

SEQ ID NO: 4446 - DNA, 16 bp, Artificial sequence
  Synthetic oligonucleotide
taagggttcttatctc

SEQ ID NO: 4447 - DNA, 16 bp, Artificial sequence
  Synthetic oligonucleotide
gaaagatcctgcagcc

SEQ ID NO: 4448 - DNA, 16 bp, Artificial sequence
  Synthetic oligonucleotide
cttccggagactacac

SEQ ID NO: 4449 - DNA, 16 bp, Artificial sequence
  Synthetic oligonucleotide
cagtttaatggctatg

SEQ ID NO: 4450 - DNA, 16 bp, Artificial sequence
  Synthetic oligonucleotide
gatttgggcatggcca

SEQ ID NO: 4451 - DNA, 16 bp, Artificial sequence
  Synthetic oligonucleotide
accgcctggtgtgttc

SEQ ID NO: 4452 - DNA, 16 bp, Artificial sequence
  Synthetic oligonucleotide
tttcgagagagggaag

SEQ ID NO: 4453 - DNA, 16 bp, Artificial sequence
  Synthetic oligonucleotide
ctcaggatgggtaggt

SEQ ID NO: 4454 - DNA, 16 bp, Artificial sequence
  Synthetic oligonucleotide
tccagtagtcatctcc

SEQ ID NO: 4455 - DNA, 16 bp, Artificial sequence
  Synthetic oligonucleotide
ctaaccagatctggca

SEQ ID NO: 4456 - DNA, 16 bp, Artificial sequence
  Synthetic oligonucleotide
cacctacaggaagttc

SEQ ID NO: 4457 - DNA, 16 bp, Artificial sequence
  Synthetic oligonucleotide
cgctcaaactgatggc

SEQ ID NO: 4458 - DNA, 16 bp, Artificial sequence
  Synthetic oligonucleotide
tttaccattattggag

SEQ ID NO: 4459 - DNA, 16 bp, Artificial sequence
  Synthetic oligonucleotide
gcagagcggccccctc

SEQ ID NO: 4460 - DNA, 16 bp, Artificial sequence
  Synthetic oligonucleotide
cagaattattcaggtc

SEQ ID NO: 4461 - DNA, 16 bp, Artificial sequence
  Synthetic oligonucleotide
agtcccaagttctaag

SEQ ID NO: 4462 - DNA, 16 bp, Artificial sequence
  Synthetic oligonucleotide
agtcctaaaagggtgt

SEQ ID NO: 4463 - DNA, 16 bp, Artificial sequence
  Synthetic oligonucleotide
ctgtatttccgtggcc

SEQ ID NO: 4464 - DNA, 16 bp, Artificial sequence
  Synthetic oligonucleotide
aacgaatatccccaca

SEQ ID NO: 4465 - DNA, 16 bp, Artificial sequence
  Synthetic oligonucleotide
gaagagtagtaagtgg

SEQ ID NO: 4466 - DNA, 16 bp, Artificial sequence
  Synthetic oligonucleotide
ccatagtgatgcatgt

SEQ ID NO: 4467 - DNA, 16 bp, Artificial sequence
  Synthetic oligonucleotide
aagggaataacacgca

SEQ ID NO: 4468 - DNA, 16 bp, Artificial sequence
  Synthetic oligonucleotide
caaaatcagccatagc

SEQ ID NO: 4469 - DNA, 16 bp, Artificial sequence
  Synthetic oligonucleotide
ttatctactatatcct

SEQ ID NO: 4470 - DNA, 16 bp, Artificial sequence
  Synthetic oligonucleotide
agtgaactacactttc

SEQ ID NO: 4471 - DNA, 16 bp, Artificial sequence
  Synthetic oligonucleotide
ccattacaattgagct

SEQ ID NO: 4472 - DNA, 16 bp, Artificial sequence
  Synthetic oligonucleotide
catatgtaatggcttc

SEQ ID NO: 4473 - DNA, 16 bp, Artificial sequence
  Synthetic oligonucleotide
aatgtaagatgctagg

SEQ ID NO: 4474 - DNA, 16 bp, Artificial sequence
  Synthetic oligonucleotide
gatttgatatcaaact

SEQ ID NO: 4475 - DNA, 16 bp, Artificial sequence
  Synthetic oligonucleotide
aaccaggaactctcca

SEQ ID NO: 4476 - DNA, 16 bp, Artificial sequence
  Synthetic oligonucleotide
ttaaatgctctatagc

SEQ ID NO: 4477 - DNA, 16 bp, Artificial sequence
  Synthetic oligonucleotide
gcgactaactacacag

SEQ ID NO: 4478 - DNA, 16 bp, Artificial sequence
  Synthetic oligonucleotide
ctacagctcgcttctt

SEQ ID NO: 4479 - DNA, 16 bp, Artificial sequence
  Synthetic oligonucleotide
atgcagcagttcacgc

SEQ ID NO: 4480 - DNA, 16 bp, Artificial sequence
  Synthetic oligonucleotide
tcctcctagcctaggc

SEQ ID NO: 4481 - DNA, 16 bp, Artificial sequence
  Synthetic oligonucleotide
cccactaatagagggc

SEQ ID NO: 4482 - DNA, 16 bp, Artificial sequence
  Synthetic oligonucleotide
gtagggtgtgtccctg

SEQ ID NO: 4483 - DNA, 16 bp, Artificial sequence
  Synthetic oligonucleotide
gccgcccttatccgct

SEQ ID NO: 4484 - DNA, 16 bp, Artificial sequence
  Synthetic oligonucleotide
aatttcagccggtcag

SEQ ID NO: 4485 - DNA, 16 bp, Artificial sequence
  Synthetic oligonucleotide
ccctgcgcttcccgtc

SEQ ID NO: 4486 - DNA, 16 bp, Artificial sequence
  Synthetic oligonucleotide
ccgagaccccggttca

SEQ ID NO: 4487 - DNA, 16 bp, Artificial sequence
  Synthetic oligonucleotide
ggtcccgcgcactagc

SEQ ID NO: 4488 - DNA, 16 bp, Artificial sequence
  Synthetic oligonucleotide
catcgccaagaaaata

SEQ ID NO: 4489 - DNA, 16 bp, Artificial sequence
  Synthetic oligonucleotide
atcagatagatatcct

SEQ ID NO: 4490 - DNA, 16 bp, Artificial sequence
  Synthetic oligonucleotide
gctcccaggtcgatat

SEQ ID NO: 4491 - DNA, 16 bp, Artificial sequence
  Synthetic oligonucleotide
aggcttagcttagggt

SEQ ID NO: 4492 - DNA, 16 bp, Artificial sequence
  Synthetic oligonucleotide
tccaggtccacgggct

SEQ ID NO: 4493 - DNA, 16 bp, Artificial sequence
  Synthetic oligonucleotide
actcagttgccaactc

SEQ ID NO: 4494 - DNA, 16 bp, Artificial sequence
  Synthetic oligonucleotide
ttaacacgcctgccaa

SEQ ID NO: 4495 - DNA, 16 bp, Artificial sequence
  Synthetic oligonucleotide
cttaaggctgaagtcg

SEQ ID NO: 4496 - DNA, 16 bp, Artificial sequence
  Synthetic oligonucleotide
caggaggccccattca

SEQ ID NO: 4497 - DNA, 16 bp, Artificial sequence
  Synthetic oligonucleotide
tccctttgggcacctg

SEQ ID NO: 4498 - DNA, 16 bp, Artificial sequence
  Synthetic oligonucleotide
aggtgtaggtgtgacc

SEQ ID NO: 4499 - DNA, 16 bp, Artificial sequence
  Synthetic oligonucleotide
gatgtttggcttgctg

SEQ ID NO: 4500 - DNA, 16 bp, Artificial sequence
  Synthetic oligonucleotide
ctcccgaagtgggaag

SEQ ID NO: 4501 - DNA, 16 bp, Artificial sequence
  Synthetic oligonucleotide
aactccttcctagtgg

SEQ ID NO: 4502 - DNA, 16 bp, Artificial sequence
  Synthetic oligonucleotide
tcattcaatagcaggg

SEQ ID NO: 4503 - DNA, 16 bp, Artificial sequence
  Synthetic oligonucleotide
cctattgatagtcatg

SEQ ID NO: 4504 - DNA, 16 bp, Artificial sequence
  Synthetic oligonucleotide
aggtcatacagttcag

SEQ ID NO: 4505 - DNA, 16 bp, Artificial sequence
  Synthetic oligonucleotide
tctcccgcattcccca

SEQ ID NO: 4506 - DNA, 16 bp, Artificial sequence
  Synthetic oligonucleotide
actgtattcagcacca

SEQ ID NO: 4507 - DNA, 16 bp, Artificial sequence
  Synthetic oligonucleotide
cccaggttacctaatt

SEQ ID NO: 4508 - DNA, 16 bp, Artificial sequence
  Synthetic oligonucleotide
attcgcttagttttaa

SEQ ID NO: 4509 - DNA, 16 bp, Artificial sequence
  Synthetic oligonucleotide
atgtaccatgaatgat

SEQ ID NO: 4510 - DNA, 16 bp, Artificial sequence
  Synthetic oligonucleotide
cctatgattcatgcgg

SEQ ID NO: 4511 - DNA, 16 bp, Artificial sequence
  Synthetic oligonucleotide
ggcctacaacctagtg

SEQ ID NO: 4512 - DNA, 16 bp, Artificial sequence
  Synthetic oligonucleotide
aaacctagtgtgacac

SEQ ID NO: 4513 - DNA, 16 bp, Artificial sequence
  Synthetic oligonucleotide
acctaacttgccacat

SEQ ID NO: 4514 - DNA, 16 bp, Artificial sequence
  Synthetic oligonucleotide
attgacttactaagag

SEQ ID NO: 4515 - DNA, 16 bp, Artificial sequence
  Synthetic oligonucleotide
catagaagtatgatat

SEQ ID NO: 4516 - DNA, 16 bp, Artificial sequence
  Synthetic oligonucleotide
tggtttacatgatcta

SEQ ID NO: 4517 - DNA, 16 bp, Artificial sequence
  Synthetic oligonucleotide
ggagtatggctggtgg

SEQ ID NO: 4518 - DNA, 16 bp, Artificial sequence
  Synthetic oligonucleotide
gcagcatttaatcctt

SEQ ID NO: 4519 - DNA, 16 bp, Artificial sequence
  Synthetic oligonucleotide
ttaaagagggcctgag

SEQ ID NO: 4520 - DNA, 16 bp, Artificial sequence
  Synthetic oligonucleotide
gtattcacctctgatt

SEQ ID NO: 4521 - DNA, 16 bp, Artificial sequence
  Synthetic oligonucleotide
acatactctggtacat

SEQ ID NO: 4522 - DNA, 16 bp, Artificial sequence
  Synthetic oligonucleotide
tatcttgagggcatat

SEQ ID NO: 4523 - DNA, 16 bp, Artificial sequence
  Synthetic oligonucleotide
gttacatgagtgactt

SEQ ID NO: 4524 - DNA, 16 bp, Artificial sequence
  Synthetic oligonucleotide
cacacgataagggaac

SEQ ID NO: 4525 - DNA, 16 bp, Artificial sequence
  Synthetic oligonucleotide
gccctagcacctttca

SEQ ID NO: 4526 - DNA, 16 bp, Artificial sequence
  Synthetic oligonucleotide
attagggacagtttaa

SEQ ID NO: 4527 - DNA, 16 bp, Artificial sequence
  Synthetic oligonucleotide
cccatagcattgactc

SEQ ID NO: 4528 - DNA, 16 bp, Artificial sequence
  Synthetic oligonucleotide
gcaggattcagtagaa

SEQ ID NO: 4529 - DNA, 16 bp, Artificial sequence
  Synthetic oligonucleotide
agttcgatggaatttc

SEQ ID NO: 4530 - DNA, 16 bp, Artificial sequence
  Synthetic oligonucleotide
tgagcattcaacttac

SEQ ID NO: 4531 - DNA, 16 bp, Artificial sequence
  Synthetic oligonucleotide
atgtaccctgaaatag

SEQ ID NO: 4532 - DNA, 16 bp, Artificial sequence
  Synthetic oligonucleotide
ctcccaaatgggctgt

SEQ ID NO: 4533 - DNA, 16 bp, Artificial sequence
  Synthetic oligonucleotide
cacacaatagtcttgg

SEQ ID NO: 4534 - DNA, 16 bp, Artificial sequence
  Synthetic oligonucleotide
gtggagcagccacgct

SEQ ID NO: 4535 - DNA, 16 bp, Artificial sequence
  Synthetic oligonucleotide
gcattacctaaagcca

SEQ ID NO: 4536 - DNA, 16 bp, Artificial sequence
  Synthetic oligonucleotide
gtgacggagagtccat

SEQ ID NO: 4537 - DNA, 16 bp, Artificial sequence
  Synthetic oligonucleotide
atattacacagaatta

SEQ ID NO: 4538 - DNA, 16 bp, Artificial sequence
  Synthetic oligonucleotide
aagtcccaagttctaa

SEQ ID NO: 4539 - DNA, 16 bp, Artificial sequence
  Synthetic oligonucleotide
cagcgatcctgctccc

SEQ ID NO: 4540 - DNA, 16 bp, Artificial sequence
  Synthetic oligonucleotide
ggattcactttggctg

SEQ ID NO: 4541 - DNA, 16 bp, Artificial sequence
  Synthetic oligonucleotide
caatttcaagtcctaa

SEQ ID NO: 4542 - DNA, 16 bp, Artificial sequence
  Synthetic oligonucleotide
aaagctgtatttccgt

SEQ ID NO: 4543 - DNA, 16 bp, Artificial sequence
  Synthetic oligonucleotide
ataacgaatatcccca

SEQ ID NO: 4544 - DNA, 16 bp, Artificial sequence
  Synthetic oligonucleotide
attgatagtcatgagt

SEQ ID NO: 4545 - DNA, 16 bp, Artificial sequence
  Synthetic oligonucleotide
ctacccatagtgatgc

SEQ ID NO: 4546 - DNA, 16 bp, Artificial sequence
  Synthetic oligonucleotide
aaagggaataacacgc

SEQ ID NO: 4547 - DNA, 16 bp, Artificial sequence
  Synthetic oligonucleotide
cttcttaacaactact

SEQ ID NO: 4548 - DNA, 16 bp, Artificial sequence
  Synthetic oligonucleotide
ctatatgtgttcaagt

SEQ ID NO: 4549 - DNA, 16 bp, Artificial sequence
  Synthetic oligonucleotide
caatgtatacacttct

SEQ ID NO: 4550 - DNA, 16 bp, Artificial sequence
  Synthetic oligonucleotide
cccattacaattgagc

SEQ ID NO: 4551 - DNA, 16 bp, Artificial sequence
  Synthetic oligonucleotide
atcaatttgcttggac

SEQ ID NO: 4552 - DNA, 16 bp, Artificial sequence
  Synthetic oligonucleotide
gaatttggaccacaga

SEQ ID NO: 4553 - DNA, 16 bp, Artificial sequence
  Synthetic oligonucleotide
caatggatatgatcat

SEQ ID NO: 4554 - DNA, 16 bp, Artificial sequence
  Synthetic oligonucleotide
tgacttagaactgtca

SEQ ID NO: 4555 - DNA, 16 bp, Artificial sequence
  Synthetic oligonucleotide
tttcctagagaggcag

SEQ ID NO: 4556 - DNA, 16 bp, Artificial sequence
  Synthetic oligonucleotide
agtatagagaagtgca

SEQ ID NO: 4557 - DNA, 16 bp, Artificial sequence
  Synthetic oligonucleotide
agtgcatatattgggt

SEQ ID NO: 4558 - DNA, 16 bp, Artificial sequence
  Synthetic oligonucleotide
cttgaggcacgggaca

SEQ ID NO: 4559 - DNA, 16 bp, Artificial sequence
  Synthetic oligonucleotide
ggattgggctcctcct

SEQ ID NO: 4560 - DNA, 16 bp, Artificial sequence
  Synthetic oligonucleotide
acgccgaccgcgcccg

SEQ ID NO: 4561 - DNA, 16 bp, Artificial sequence
  Synthetic oligonucleotide
gcagtagggtgtgtcc

SEQ ID NO: 4562 - DNA, 16 bp, Artificial sequence
  Synthetic oligonucleotide
agaactgggccgccct

SEQ ID NO: 4563 - DNA, 16 bp, Artificial sequence
  Synthetic oligonucleotide
gagaatttcagccggt

SEQ ID NO: 4564 - DNA, 16 bp, Artificial sequence
  Synthetic oligonucleotide
cccggaccctgcgctt

SEQ ID NO: 4565 - DNA, 16 bp, Artificial sequence
  Synthetic oligonucleotide
tctccgagaccccggt

SEQ ID NO: 4566 - DNA, 16 bp, Artificial sequence
  Synthetic oligonucleotide
ggccgcgcagggagcc

SEQ ID NO: 4567 - DNA, 16 bp, Artificial sequence
  Synthetic oligonucleotide
ctaagtcacaaatccc

SEQ ID NO: 4568 - DNA, 16 bp, Artificial sequence
  Synthetic oligonucleotide
cacgatccattgctag

SEQ ID NO: 4569 - DNA, 16 bp, Artificial sequence
  Synthetic oligonucleotide
agctcccaggtcgata

SEQ ID NO: 4570 - DNA, 16 bp, Artificial sequence
  Synthetic oligonucleotide
ccaaggcttagcttag

SEQ ID NO: 4571 - DNA, 16 bp, Artificial sequence
  Synthetic oligonucleotide
catgtggatccaggtc

SEQ ID NO: 4572 - DNA, 16 bp, Artificial sequence
  Synthetic oligonucleotide
gctacggtcacattct

SEQ ID NO: 4573 - DNA, 16 bp, Artificial sequence
  Synthetic oligonucleotide
ttttaacacgcctgcc

SEQ ID NO: 4574 - DNA, 16 bp, Artificial sequence
  Synthetic oligonucleotide
ttcgccacttaaggct

SEQ ID NO: 4575 - DNA, 16 bp, Artificial sequence
  Synthetic oligonucleotide
ggcacgatgccaggag

SEQ ID NO: 4576 - DNA, 16 bp, Artificial sequence
  Synthetic oligonucleotide
ccctgaactcagacgc

SEQ ID NO: 4577 - DNA, 16 bp, Artificial sequence
  Synthetic oligonucleotide
aataggtgtaggtgtg

SEQ ID NO: 4578 - DNA, 16 bp, Artificial sequence
  Synthetic oligonucleotide
tctagatgtttggctt

SEQ ID NO: 4579 - DNA, 16 bp, Artificial sequence
  Synthetic oligonucleotide
agagactcccgaagtg

SEQ ID NO: 4580 - DNA, 16 bp, Artificial sequence
  Synthetic oligonucleotide
aggtctaaggaaatca

SEQ ID NO: 4581 - DNA, 16 bp, Artificial sequence
  Synthetic oligonucleotide
gatcttggagacttca

SEQ ID NO: 4582 - DNA, 16 bp, Artificial sequence
  Synthetic oligonucleotide
ccaaagcattgatcta

SEQ ID NO: 4583 - DNA, 16 bp, Artificial sequence
  Synthetic oligonucleotide
ctctcgggcaccaaag

SEQ ID NO: 4584 - DNA, 16 bp, Artificial sequence
  Synthetic oligonucleotide
ctgaaccctgttcccc

SEQ ID NO: 4585 - DNA, 16 bp, Artificial sequence
  Synthetic oligonucleotide
ccagggtacctgcccc

SEQ ID NO: 4586 - DNA, 16 bp, Artificial sequence
  Synthetic oligonucleotide
ataattcgcttagttt

SEQ ID NO: 4587 - DNA, 16 bp, Artificial sequence
  Synthetic oligonucleotide
ctccttggtaattcac

SEQ ID NO: 4588 - DNA, 16 bp, Artificial sequence
  Synthetic oligonucleotide
actttgcctatgattc

SEQ ID NO: 4589 - DNA, 16 bp, Artificial sequence
  Synthetic oligonucleotide
agggcctacaacctag

SEQ ID NO: 4590 - DNA, 16 bp, Artificial sequence
  Synthetic oligonucleotide
gattcgagttcagaga

SEQ ID NO: 4591 - DNA, 16 bp, Artificial sequence
  Synthetic oligonucleotide
cccacctaacttgcca

SEQ ID NO: 4592 - DNA, 16 bp, Artificial sequence
  Synthetic oligonucleotide
tctattgacttactaa

SEQ ID NO: 4593 - DNA, 16 bp, Artificial sequence
  Synthetic oligonucleotide
acctaccagatttaaa

SEQ ID NO: 4594 - DNA, 16 bp, Artificial sequence
  Synthetic oligonucleotide
ttgtagctatattcta

SEQ ID NO: 4595 - DNA, 16 bp, Artificial sequence
  Synthetic oligonucleotide
agggtaaaaatctgca

SEQ ID NO: 4596 - DNA, 16 bp, Artificial sequence
  Synthetic oligonucleotide
tgtgttaaagagggcc

SEQ ID NO: 4597 - DNA, 16 bp, Artificial sequence
  Synthetic oligonucleotide
cagtattcacctctga

SEQ ID NO: 4598 - DNA, 16 bp, Artificial sequence
  Synthetic oligonucleotide
agacatactctggtac

SEQ ID NO: 4599 - DNA, 16 bp, Artificial sequence
  Synthetic oligonucleotide
catcgcttatgaaact

SEQ ID NO: 4600 - DNA, 16 bp, Artificial sequence
  Synthetic oligonucleotide
cagttacatgagtgac

SEQ ID NO: 4601 - DNA, 16 bp, Artificial sequence
  Synthetic oligonucleotide
cttagaactgtcacac

SEQ ID NO: 4602 - DNA, 16 bp, Artificial sequence
  Synthetic oligonucleotide
gagccctagcaccttt

SEQ ID NO: 4603 - DNA, 16 bp, Artificial sequence
  Synthetic oligonucleotide
accttacagtgggatt

SEQ ID NO: 4604 - DNA, 16 bp, Artificial sequence
  Synthetic oligonucleotide
cacccatagcattgac

SEQ ID NO: 4605 - DNA, 16 bp, Artificial sequence
  Synthetic oligonucleotide
atgcaggattcagtag

SEQ ID NO: 4606 - DNA, 16 bp, Artificial sequence
  Synthetic oligonucleotide
cttaaggactgtgtgt

SEQ ID NO: 4607 - DNA, 16 bp, Artificial sequence
  Synthetic oligonucleotide
gctgagcattcaactt

SEQ ID NO: 4608 - DNA, 16 bp, Artificial sequence
  Synthetic oligonucleotide
atagatgtaccctgaa

SEQ ID NO: 4609 - DNA, 16 bp, Artificial sequence
  Synthetic oligonucleotide
ggctcccaaatgggct

SEQ ID NO: 4610 - DNA, 16 bp, Artificial sequence
  Synthetic oligonucleotide
cttgactggcccctgt

SEQ ID NO: 4611 - DNA, 16 bp, Artificial sequence
  Synthetic oligonucleotide
gcccttcggtgttgga

SEQ ID NO: 4612 - DNA, 16 bp, Artificial sequence
  Synthetic oligonucleotide
tggcattacctaaagc

SEQ ID NO: 4613 - DNA, 16 bp, Artificial sequence
  Synthetic oligonucleotide
gagagaccagtgagtt

SEQ ID NO: 4614 - DNA, 16 bp, Artificial sequence
  Synthetic oligonucleotide
gtctccattctatctt

SEQ ID NO: 4615 - DNA, 16 bp, Artificial sequence
  Synthetic oligonucleotide
gtgtccagattgcagt

SEQ ID NO: 4616 - DNA, 16 bp, Artificial sequence
  Synthetic oligonucleotide
ataaatactcctcttc

SEQ ID NO: 4617 - DNA, 16 bp, Artificial sequence
  Synthetic oligonucleotide
ccttttaaacccagga

SEQ ID NO: 4618 - DNA, 16 bp, Artificial sequence
  Synthetic oligonucleotide
caagttaaatggttcg

SEQ ID NO: 4619 - DNA, 16 bp, Artificial sequence
  Synthetic oligonucleotide
agtagtaagtggtcat

SEQ ID NO: 4620 - DNA, 16 bp, Artificial sequence
  Synthetic oligonucleotide
gttgaagaacacatga

SEQ ID NO: 4621 - DNA, 16 bp, Artificial sequence
  Synthetic oligonucleotide
aacacgcagccactga

SEQ ID NO: 4622 - DNA, 16 bp, Artificial sequence
  Synthetic oligonucleotide
gattcgacatgcaagc

SEQ ID NO: 4623 - DNA, 16 bp, Artificial sequence
  Synthetic oligonucleotide
acattgattgtagcat

SEQ ID NO: 4624 - DNA, 16 bp, Artificial sequence
  Synthetic oligonucleotide
gaaacatactaagttc

SEQ ID NO: 4625 - DNA, 16 bp, Artificial sequence
  Synthetic oligonucleotide
acaattgagctctttg

SEQ ID NO: 4626 - DNA, 16 bp, Artificial sequence
  Synthetic oligonucleotide
gtaactgagtaagata

SEQ ID NO: 4627 - DNA, 16 bp, Artificial sequence
  Synthetic oligonucleotide
ccagtagaatctagga

SEQ ID NO: 4628 - DNA, 16 bp, Artificial sequence
  Synthetic oligonucleotide
aaaattgagtaagggt

SEQ ID NO: 4629 - DNA, 16 bp, Artificial sequence
  Synthetic oligonucleotide
aatatacttaaatcgc

SEQ ID NO: 4630 - DNA, 16 bp, Artificial sequence
  Synthetic oligonucleotide
tatctaatcatccaac

SEQ ID NO: 4631 - DNA, 16 bp, Artificial sequence
  Synthetic oligonucleotide
gtagaatctcagaagt

SEQ ID NO: 4632 - DNA, 16 bp, Artificial sequence
  Synthetic oligonucleotide
gctcgcttcttccttt

SEQ ID NO: 4633 - DNA, 16 bp, Artificial sequence
  Synthetic oligonucleotide
cctctagtgtactgtg

SEQ ID NO: 4634 - DNA, 16 bp, Artificial sequence
  Synthetic oligonucleotide
ggcaaaaccagactac

SEQ ID NO: 4635 - DNA, 16 bp, Artificial sequence
  Synthetic oligonucleotide
tctcgggtcctggagc

SEQ ID NO: 4636 - DNA, 16 bp, Artificial sequence
  Synthetic oligonucleotide
tggccttaaatgcgcc

SEQ ID NO: 4637 - DNA, 16 bp, Artificial sequence
  Synthetic oligonucleotide
ccttatccgctatcca

SEQ ID NO: 4638 - DNA, 16 bp, Artificial sequence
  Synthetic oligonucleotide
gagccggcaggacatt

SEQ ID NO: 4639 - DNA, 16 bp, Artificial sequence
  Synthetic oligonucleotide
tcccgtccaccgcgcg

SEQ ID NO: 4640 - DNA, 16 bp, Artificial sequence
  Synthetic oligonucleotide
ttcagatggtgaattc

SEQ ID NO: 4641 - DNA, 16 bp, Artificial sequence
  Synthetic oligonucleotide
cgcgcactagcggaag

SEQ ID NO: 4642 - DNA, 16 bp, Artificial sequence
  Synthetic oligonucleotide
gatctaatgggctgga

SEQ ID NO: 4643 - DNA, 16 bp, Artificial sequence
  Synthetic oligonucleotide
cccagggatggcgaaa

SEQ ID NO: 4644 - DNA, 16 bp, Artificial sequence
  Synthetic oligonucleotide
cccaggtcgatatttt

SEQ ID NO: 4645 - DNA, 16 bp, Artificial sequence
  Synthetic oligonucleotide
tagcttagggttttgc

SEQ ID NO: 4646 - DNA, 16 bp, Artificial sequence
  Synthetic oligonucleotide
gctcttaacatcaatc

SEQ ID NO: 4647 - DNA, 16 bp, Artificial sequence
  Synthetic oligonucleotide
atgcaaacccaccacg

SEQ ID NO: 4648 - DNA, 16 bp, Artificial sequence
  Synthetic oligonucleotide
ccccttccgggcccaa

SEQ ID NO: 4649 - DNA, 16 bp, Artificial sequence
  Synthetic oligonucleotide
gcggcagagataacca

SEQ ID NO: 4650 - DNA, 16 bp, Artificial sequence
  Synthetic oligonucleotide
gtggcaacccccagag

SEQ ID NO: 4651 - DNA, 16 bp, Artificial sequence
  Synthetic oligonucleotide
aagggagtgattcacc

SEQ ID NO: 4652 - DNA, 16 bp, Artificial sequence
  Synthetic oligonucleotide
ctgcttgaatcatgga

SEQ ID NO: 4653 - DNA, 16 bp, Artificial sequence
  Synthetic oligonucleotide
ctctcttagatatccc

SEQ ID NO: 4654 - DNA, 16 bp, Artificial sequence
  Synthetic oligonucleotide
gtgggaagttcacatt

SEQ ID NO: 4655 - DNA, 16 bp, Artificial sequence
  Synthetic oligonucleotide
tgagatggtctgtgat

SEQ ID NO: 4656 - DNA, 16 bp, Artificial sequence
  Synthetic oligonucleotide
tcctttgggtcagtag

SEQ ID NO: 4657 - DNA, 16 bp, Artificial sequence
  Synthetic oligonucleotide
agagtagtaagtggtc

SEQ ID NO: 4658 - DNA, 16 bp, Artificial sequence
  Synthetic oligonucleotide
cctgggtattggcatc

SEQ ID NO: 4659 - DNA, 16 bp, Artificial sequence
  Synthetic oligonucleotide
ccatggttcttcctat

SEQ ID NO: 4660 - DNA, 16 bp, Artificial sequence
  Synthetic oligonucleotide
tgaatacccttcggta

SEQ ID NO: 4661 - DNA, 16 bp, Artificial sequence
  Synthetic oligonucleotide
tgttacaggcagaccc

SEQ ID NO: 4662 - DNA, 16 bp, Artificial sequence
  Synthetic oligonucleotide
gtttaggaggaattct

SEQ ID NO: 4663 - DNA, 16 bp, Artificial sequence
  Synthetic oligonucleotide
tgatcaaagcctgctt

SEQ ID NO: 4664 - DNA, 16 bp, Artificial sequence
  Synthetic oligonucleotide
catgcggaaagcaaaa

SEQ ID NO: 4665 - DNA, 16 bp, Artificial sequence
  Synthetic oligonucleotide
tacaacctagtgagtt

SEQ ID NO: 4666 - DNA, 16 bp, Artificial sequence
  Synthetic oligonucleotide
agtgtggcgatactct

SEQ ID NO: 4667 - DNA, 16 bp, Artificial sequence
  Synthetic oligonucleotide
cttgaggcactaatat

SEQ ID NO: 4668 - DNA, 16 bp, Artificial sequence
  Synthetic oligonucleotide
aactcaaagggctagt

SEQ ID NO: 4669 - DNA, 16 bp, Artificial sequence
  Synthetic oligonucleotide
ggtgttaatcatgaaa

SEQ ID NO: 4670 - DNA, 16 bp, Artificial sequence
  Synthetic oligonucleotide
gtagaagactttagct

SEQ ID NO: 4671 - DNA, 16 bp, Artificial sequence
  Synthetic oligonucleotide
gagacaatatcttaga

SEQ ID NO: 4672 - DNA, 16 bp, Artificial sequence
  Synthetic oligonucleotide
agcataccttcaatgc

SEQ ID NO: 4673 - DNA, 16 bp, Artificial sequence
  Synthetic oligonucleotide
ctttgaagggcttatc

SEQ ID NO: 4674 - DNA, 16 bp, Artificial sequence
  Synthetic oligonucleotide
gtacacacccacacat

SEQ ID NO: 4675 - DNA, 16 bp, Artificial sequence
  Synthetic oligonucleotide
gaatccaccactacat

SEQ ID NO: 4676 - DNA, 16 bp, Artificial sequence
  Synthetic oligonucleotide
atatccactgatgcaa

SEQ ID NO: 4677 - DNA, 16 bp, Artificial sequence
  Synthetic oligonucleotide
tgacttaagggttctt

SEQ ID NO: 4678 - DNA, 16 bp, Artificial sequence
  Synthetic oligonucleotide
agtggaaagatcctgc

SEQ ID NO: 4679 - DNA, 16 bp, Artificial sequence
  Synthetic oligonucleotide
ccacttccggagacta

SEQ ID NO: 4680 - DNA, 16 bp, Artificial sequence
  Synthetic oligonucleotide
gacagtttaatggcta

SEQ ID NO: 4681 - DNA, 16 bp, Artificial sequence
  Synthetic oligonucleotide
tctgatttgggcatgg

SEQ ID NO: 4682 - DNA, 16 bp, Artificial sequence
  Synthetic oligonucleotide
catgaccgcctggtgt

SEQ ID NO: 4683 - DNA, 16 bp, Artificial sequence
  Synthetic oligonucleotide
gatggaatttcgagag

SEQ ID NO: 4684 - DNA, 16 bp, Artificial sequence
  Synthetic oligonucleotide
caacttacaagagttt

SEQ ID NO: 4685 - DNA, 16 bp, Artificial sequence
  Synthetic oligonucleotide
gcaacccaagacagtt

SEQ ID NO: 4686 - DNA, 16 bp, Artificial sequence
  Synthetic oligonucleotide
gctgtctaaccagatc

SEQ ID NO: 4687 - DNA, 16 bp, Artificial sequence
  Synthetic oligonucleotide
ggaaccaaaatgggac

SEQ ID NO: 4688 - DNA, 16 bp, Artificial sequence
  Synthetic oligonucleotide
ccacgctcaaactgat

SEQ ID NO: 4689 - DNA, 16 bp, Artificial sequence
  Synthetic oligonucleotide
tacctaaagccaatgg

SEQ ID NO: 4690 - DNA, 16 bp, Artificial sequence
  Synthetic oligonucleotide
atggcagagcggcccc

SEQ ID NO: 4691 - DNA, 16 bp, Artificial sequence
  Synthetic oligonucleotide
gaattattcaggtctc

SEQ ID NO: 4692 - DNA, 16 bp, Artificial sequence
  Synthetic oligonucleotide
gtcccaagttctaaga

SEQ ID NO: 4693 - DNA, 16 bp, Artificial sequence
  Synthetic oligonucleotide
cataaatactcctctt

SEQ ID NO: 4694 - DNA, 16 bp, Artificial sequence
  Synthetic oligonucleotide
tatttccgtggccttt

SEQ ID NO: 4695 - DNA, 16 bp, Artificial sequence
  Synthetic oligonucleotide
tcacaaatcgatgtca

SEQ ID NO: 4696 - DNA, 16 bp, Artificial sequence
  Synthetic oligonucleotide
gagtagtaagtggtca

SEQ ID NO: 4697 - DNA, 16 bp, Artificial sequence
  Synthetic oligonucleotide
tacataggacaggctc

SEQ ID NO: 4698 - DNA, 16 bp, Artificial sequence
  Synthetic oligonucleotide
ggaataacacgcagcc

SEQ ID NO: 4699 - DNA, 16 bp, Artificial sequence
  Synthetic oligonucleotide
ttggattcgacatgca

SEQ ID NO: 4700 - DNA, 16 bp, Artificial sequence
  Synthetic oligonucleotide
agtgaacatatactca

SEQ ID NO: 4701 - DNA, 16 bp, Artificial sequence
  Synthetic oligonucleotide
attgacttaatatgga

SEQ ID NO: 4702 - DNA, 16 bp, Artificial sequence
  Synthetic oligonucleotide
cattacaattgagctc

SEQ ID NO: 4703 - DNA, 16 bp, Artificial sequence
  Synthetic oligonucleotide
tatgtaatggcttcaa

SEQ ID NO: 4704 - DNA, 16 bp, Artificial sequence
  Synthetic oligonucleotide
gcagaatgcaagatgt

SEQ ID NO: 4705 - DNA, 16 bp, Artificial sequence
  Synthetic oligonucleotide
ccagaatatgttacag

SEQ ID NO: 4706 - DNA, 16 bp, Artificial sequence
  Synthetic oligonucleotide
acaacggaggacagga

SEQ ID NO: 4707 - DNA, 16 bp, Artificial sequence
  Synthetic oligonucleotide
acatttgacttgagtt

SEQ ID NO: 4708 - DNA, 16 bp, Artificial sequence
  Synthetic oligonucleotide
cgactaactacacagc

SEQ ID NO: 4709 - DNA, 16 bp, Artificial sequence
  Synthetic oligonucleotide
cagctcgcttcttcct

SEQ ID NO: 4710 - DNA, 16 bp, Artificial sequence
  Synthetic oligonucleotide
cctacctctagtgtac

SEQ ID NO: 4711 - DNA, 16 bp, Artificial sequence
  Synthetic oligonucleotide
cctaggcaaaaccaga

SEQ ID NO: 4712 - DNA, 16 bp, Artificial sequence
  Synthetic oligonucleotide
cctctcgggtcctgga

SEQ ID NO: 4713 - DNA, 16 bp, Artificial sequence
  Synthetic oligonucleotide
aggagacagtcacttg

SEQ ID NO: 4714 - DNA, 16 bp, Artificial sequence
  Synthetic oligonucleotide
gcccttatccgctatc

SEQ ID NO: 4715 - DNA, 16 bp, Artificial sequence
  Synthetic oligonucleotide
agccggtcagagccgg

SEQ ID NO: 4716 - DNA, 16 bp, Artificial sequence
  Synthetic oligonucleotide
ctgcgcttcccgtcca

SEQ ID NO: 4717 - DNA, 16 bp, Artificial sequence
  Synthetic oligonucleotide
ccccggttcagatggt

SEQ ID NO: 4718 - DNA, 16 bp, Artificial sequence
  Synthetic oligonucleotide
cccgcgcactagcgga

SEQ ID NO: 4719 - DNA, 16 bp, Artificial sequence
  Synthetic oligonucleotide
ttaagatctaatgggc

SEQ ID NO: 4720 - DNA, 16 bp, Artificial sequence
  Synthetic oligonucleotide
cagatagatatcctga

SEQ ID NO: 4721 - DNA, 16 bp, Artificial sequence
  Synthetic oligonucleotide
ctcccaggtcgatatt

SEQ ID NO: 4722 - DNA, 16 bp, Artificial sequence
  Synthetic oligonucleotide
gcttagcttagggttt

SEQ ID NO: 4723 - DNA, 16 bp, Artificial sequence
  Synthetic oligonucleotide
ccacgggctcttaaca

SEQ ID NO: 4724 - DNA, 16 bp, Artificial sequence
  Synthetic oligonucleotide
actcaccatgcaaacc

SEQ ID NO: 4725 - DNA, 16 bp, Artificial sequence
  Synthetic oligonucleotide
gcccccttccgggccc

SEQ ID NO: 4726 - DNA, 16 bp, Artificial sequence
  Synthetic oligonucleotide
gatagcggcagagata

SEQ ID NO: 4727 - DNA, 16 bp, Artificial sequence
  Synthetic oligonucleotide
acaacatgagtggcaa

SEQ ID NO: 4728 - DNA, 16 bp, Artificial sequence
  Synthetic oligonucleotide
ccaagggagtgattca

SEQ ID NO: 4729 - DNA, 16 bp, Artificial sequence
  Synthetic oligonucleotide
caccctactgcttgaa

SEQ ID NO: 4730 - DNA, 16 bp, Artificial sequence
  Synthetic oligonucleotide
gataaggactgtctct

SEQ ID NO: 4731 - DNA, 16 bp, Artificial sequence
  Synthetic oligonucleotide
cgaagtgggaagttca

SEQ ID NO: 4732 - DNA, 16 bp, Artificial sequence
  Synthetic oligonucleotide
cctttgagatggtctg

SEQ ID NO: 4733 - DNA, 16 bp, Artificial sequence
  Synthetic oligonucleotide
gaatcctttgggtcag

SEQ ID NO: 4734 - DNA, 16 bp, Artificial sequence
  Synthetic oligonucleotide
gatagtcatgagtttg

SEQ ID NO: 4735 - DNA, 16 bp, Artificial sequence
  Synthetic oligonucleotide
aattcctgggtattgg

SEQ ID NO: 4736 - DNA, 16 bp, Artificial sequence
  Synthetic oligonucleotide
agggccttggttcttc

SEQ ID NO: 4737 - DNA, 16 bp, Artificial sequence
  Synthetic oligonucleotide
attgaatacccttcgg

SEQ ID NO: 4738 - DNA, 16 bp, Artificial sequence
  Synthetic oligonucleotide
aatttgttacaggcag

SEQ ID NO: 4739 - DNA, 16 bp, Artificial sequence
  Synthetic oligonucleotide
tcgcttagttttaaga

SEQ ID NO: 4740 - DNA, 16 bp, Artificial sequence
  Synthetic oligonucleotide
taccatgaatgatcaa

SEQ ID NO: 4741 - DNA, 16 bp, Artificial sequence
  Synthetic oligonucleotide
tgattcatgcggaaag

SEQ ID NO: 4742 - DNA, 16 bp, Artificial sequence
  Synthetic oligonucleotide
cctacaacctagtgag

SEQ ID NO: 4743 - DNA, 16 bp, Artificial sequence
  Synthetic oligonucleotide
gtggctaaactataga

SEQ ID NO: 4744 - DNA, 16 bp, Artificial sequence
  Synthetic oligonucleotide
ctaacttgccacatac

SEQ ID NO: 4745 - DNA, 16 bp, Artificial sequence
  Synthetic oligonucleotide
tgacttactaagagtc

SEQ ID NO: 4746 - DNA, 16 bp, Artificial sequence
  Synthetic oligonucleotide
atatggtgttaatcat

SEQ ID NO: 4747 - DNA, 16 bp, Artificial sequence
  Synthetic oligonucleotide
aataacatggcctgaa

SEQ ID NO: 4748 - DNA, 16 bp, Artificial sequence
  Synthetic oligonucleotide
agtatggctggtggag

SEQ ID NO: 4749 - DNA, 16 bp, Artificial sequence
  Synthetic oligonucleotide
gtaactgccatatgta

SEQ ID NO: 4750 - DNA, 16 bp, Artificial sequence
  Synthetic oligonucleotide
tgcctactaccttccc

SEQ ID NO: 4751 - DNA, 16 bp, Artificial sequence
  Synthetic oligonucleotide
tgtgtccagattgcag

SEQ ID NO: 4752 - DNA, 16 bp, Artificial sequence
  Synthetic oligonucleotide
atgaatttggaccaca

SEQ ID NO: 4753 - DNA, 16 bp, Artificial sequence
  Synthetic oligonucleotide
agggcatatccactga

SEQ ID NO: 4754 - DNA, 16 bp, Artificial sequence
  Synthetic oligonucleotide
agtgacttaagggttc

SEQ ID NO: 4755 - DNA, 16 bp, Artificial sequence
  Synthetic oligonucleotide
ttagtggaaagatcct

SEQ ID NO: 4756 - DNA, 16 bp, Artificial sequence
  Synthetic oligonucleotide
ataatgcagccctcac

SEQ ID NO: 4757 - DNA, 16 bp, Artificial sequence
  Synthetic oligonucleotide
tagggacagtttaatg

SEQ ID NO: 4758 - DNA, 16 bp, Artificial sequence
  Synthetic oligonucleotide
tagcattgactctgat

SEQ ID NO: 4759 - DNA, 16 bp, Artificial sequence
  Synthetic oligonucleotide
ccagcatgaccgcctg

SEQ ID NO: 4760 - DNA, 16 bp, Artificial sequence
  Synthetic oligonucleotide
tcgatggaatttcgag

SEQ ID NO: 4761 - DNA, 16 bp, Artificial sequence
  Synthetic oligonucleotide
ttcaacttacaagagt

SEQ ID NO: 4762 - DNA, 16 bp, Artificial sequence
  Synthetic oligonucleotide
tgattctttggctggg

SEQ ID NO: 4763 - DNA, 16 bp, Artificial sequence
  Synthetic oligonucleotide
aaatgggctgtctaac

SEQ ID NO: 4764 - DNA, 16 bp, Artificial sequence
  Synthetic oligonucleotide
acaatagtcttggaac

SEQ ID NO: 4765 - DNA, 16 bp, Artificial sequence
  Synthetic oligonucleotide
agccacgctcaaactg

SEQ ID NO: 4766 - DNA, 16 bp, Artificial sequence
  Synthetic oligonucleotide
attacctaaagccaat

SEQ ID NO: 4767 - DNA, 16 bp, Artificial sequence
  Synthetic oligonucleotide
gacggagagtccatgg

SEQ ID NO: 4768 - DNA, 16 bp, Artificial sequence
  Synthetic oligonucleotide
gcttacagcccaaagg

SEQ ID NO: 4769 - DNA, 16 bp, Artificial sequence
  Synthetic oligonucleotide
tgcttacagcccaaag

SEQ ID NO: 4770 - DNA, 16 bp, Artificial sequence
  Synthetic oligonucleotide
cggagtttctgcttac

SEQ ID NO: 4771 - DNA, 16 bp, Artificial sequence
  Synthetic oligonucleotide
gcggagtttctgctta

SEQ ID NO: 4772 - DNA, 16 bp, Artificial sequence
  Synthetic oligonucleotide
cagcggagtttctgct

SEQ ID NO: 4773 - DNA, 16 bp, Artificial sequence
  Synthetic oligonucleotide
tttccggccaaacagc

SEQ ID NO: 4774 - DNA, 16 bp, Artificial sequence
  Synthetic oligonucleotide
gtttccggccaaacag

SEQ ID NO: 4775 - DNA, 16 bp, Artificial sequence
  Synthetic oligonucleotide
agtttccggccaaaca

SEQ ID NO: 4776 - DNA, 16 bp, Artificial sequence
  Synthetic oligonucleotide
cggagtttccggccaa

SEQ ID NO: 4777 - DNA, 16 bp, Artificial sequence
  Synthetic oligonucleotide
gcggagtttccggcca

SEQ ID NO: 4778 - DNA, 16 bp, Artificial sequence
  Synthetic oligonucleotide
agcggagtttccggcc

SEQ ID NO: 4779 - DNA, 16 bp, Artificial sequence
  Synthetic oligonucleotide
cagcggagtttccggc

SEQ ID NO: 4780 - DNA, 16 bp, Artificial sequence
  Synthetic oligonucleotide
ctcagcggagtttccg

SEQ ID NO: 4781 - DNA, 16 bp, Artificial sequence
  Synthetic oligonucleotide
gctcagcggagtttcc

SEQ ID NO: 4782 - DNA, 16 bp, Artificial sequence
  Synthetic oligonucleotide
tgccggccaaacagcg

SEQ ID NO: 4783 - DNA, 16 bp, Artificial sequence
  Synthetic oligonucleotide
ttgccggccaaacagc

SEQ ID NO: 4784 - DNA, 16 bp, Artificial sequence
  Synthetic oligonucleotide
attgccggccaaacag

SEQ ID NO: 4785 - DNA, 16 bp, Artificial sequence
  Synthetic oligonucleotide
cattgccggccaaaca

SEQ ID NO: 4786 - DNA, 16 bp, Artificial sequence
  Synthetic oligonucleotide
ccattgccggccaaac

SEQ ID NO: 4787 - DNA, 16 bp, Artificial sequence
  Synthetic oligonucleotide
tccattgccggccaaa

SEQ ID NO: 4788 - DNA, 16 bp, Artificial sequence
  Synthetic oligonucleotide
atccattgccggccaa

SEQ ID NO: 4789 - DNA, 16 bp, Artificial sequence
  Synthetic oligonucleotide
gatccattgccggcca

SEQ ID NO: 4790 - DNA, 16 bp, Artificial sequence
  Synthetic oligonucleotide
cgatccattgccggcc

SEQ ID NO: 4791 - DNA, 16 bp, Artificial sequence
  Synthetic oligonucleotide
acgatccattgccggc

SEQ ID NO: 4792 - DNA, 16 bp, Artificial sequence
  Synthetic oligonucleotide
cacgatccattgccgg

SEQ ID NO: 4793 - DNA, 16 bp, Artificial sequence
  Synthetic oligonucleotide
ccacgatccattgccg

SEQ ID NO: 4794 - DNA, 16 bp, Artificial sequence
  Synthetic oligonucleotide
cccacgatccattgcc

SEQ ID NO: 4795 - DNA, 16 bp, Artificial sequence
  Synthetic oligonucleotide
attccggccaaacagc

SEQ ID NO: 4796 - DNA, 16 bp, Artificial sequence
  Synthetic oligonucleotide
cattccggccaaacag

SEQ ID NO: 4797 - DNA, 16 bp, Artificial sequence
  Synthetic oligonucleotide
ccattccggccaaaca

SEQ ID NO: 4798 - DNA, 16 bp, Artificial sequence
  Synthetic oligonucleotide
gccattccggccaaac

SEQ ID NO: 4799 - DNA, 16 bp, Artificial sequence
  Synthetic oligonucleotide
agccattccggccaaa

SEQ ID NO: 4800 - DNA, 16 bp, Artificial sequence
  Synthetic oligonucleotide
cagccattccggccaa

SEQ ID NO: 4801 - DNA, 16 bp, Artificial sequence
  Synthetic oligonucleotide
gcagccattccggcca

SEQ ID NO: 4802 - DNA, 16 bp, Artificial sequence
  Synthetic oligonucleotide
tgcagccattccggcc

SEQ ID NO: 4803 - DNA, 16 bp, Artificial sequence
  Synthetic oligonucleotide
ctgcagccattccggc

SEQ ID NO: 4804 - DNA, 16 bp, Artificial sequence
  Synthetic oligonucleotide
actgcagccattccgg

SEQ ID NO: 4805 - DNA, 16 bp, Artificial sequence
  Synthetic oligonucleotide
gactgcagccattccg

SEQ ID NO: 4806 - DNA, 16 bp, Artificial sequence
  Synthetic oligonucleotide
agcggagtttctgcag

SEQ ID NO: 4807 - DNA, 16 bp, Artificial sequence
  Synthetic oligonucleotide
aaccatttatattaca

SEQ ID NO: 4808 - DNA, 16 bp, Artificial sequence
  Synthetic oligonucleotide
cgggaaaggcagttgc

SEQ ID NO: 4809 - DNA, 16 bp, Artificial sequence
  Synthetic oligonucleotide
cacgcacagacctggg

SEQ ID NO: 4810 - DNA, 16 bp, Artificial sequence
  Synthetic oligonucleotide
tcacgcacagacctgg

SEQ ID NO: 4811 - DNA, 16 bp, Artificial sequence
  Synthetic oligonucleotide
catcacgcacagacct

SEQ ID NO: 4812 - DNA, 16 bp, Artificial sequence
  Synthetic oligonucleotide
tcagcggagtttctgc

SEQ ID NO: 4813 - DNA, 16 bp, Artificial sequence
  Synthetic oligonucleotide
gaggagcattctggcg

SEQ ID NO: 4814 - DNA, 16 bp, Artificial sequence
  Synthetic oligonucleotide
ccacgatccattggct

SEQ ID NO: 4815 - DNA, 16 bp, Artificial sequence
  Synthetic oligonucleotide
aagatgatcgacagga

SEQ ID NO: 4816 - DNA, 16 bp, Artificial sequence
  Synthetic oligonucleotide
tgtagatggccgcagc

SEQ ID NO: 4817 - DNA, 16 bp, Artificial sequence
  Synthetic oligonucleotide
gtccttggaggcacag

SEQ ID NO: 4818 - DNA, 16 bp, Artificial sequence
  Synthetic oligonucleotide
gatttctttgcagcca

SEQ ID NO: 4819 - DNA, 16 bp, Artificial sequence
  Synthetic oligonucleotide
attctggcggcaagtt

SEQ ID NO: 4820 - DNA, 16 bp, Artificial sequence
  Synthetic oligonucleotide
gatactcagcaacagg

SEQ ID NO: 4821 - DNA, 16 bp, Artificial sequence
  Synthetic oligonucleotide
cgaacagcagcaccag

SEQ ID NO: 4822 - DNA, 16 bp, Artificial sequence
  Synthetic oligonucleotide
cacgatccattggctg

SEQ ID NO: 4823 - DNA, 16 bp, Artificial sequence
  Synthetic oligonucleotide
ttctgccagagatcag

SEQ ID NO: 4824 - DNA, 16 bp, Artificial sequence
  Synthetic oligonucleotide
gtggtggacatttcct

SEQ ID NO: 4825 - DNA, 16 bp, Artificial sequence
  Synthetic oligonucleotide
agactgcagccattcg

SEQ ID NO: 4826 - DNA, 16 bp, Artificial sequence
  Synthetic oligonucleotide
acaggatcatggtggc

SEQ ID NO: 4827 - DNA, 16 bp, Artificial sequence
  Synthetic oligonucleotide
gagacagaatgctgaa

SEQ ID NO: 4828 - DNA, 16 bp, Artificial sequence
  Synthetic oligonucleotide
aaacctgccccccttg

SEQ ID NO: 4829 - DNA, 16 bp, Artificial sequence
  Synthetic oligonucleotide
aagattccagtgatgt

SEQ ID NO: 4830 - DNA, 16 bp, Artificial sequence
  Synthetic oligonucleotide
tcacgcacagaccagc

SEQ ID NO: 4831 - DNA, 16 bp, Artificial sequence
  Synthetic oligonucleotide
caccgtgtagatggcc

SEQ ID NO: 4832 - DNA, 16 bp, Artificial sequence
  Synthetic oligonucleotide
agttgagatgccactc

SEQ ID NO: 4833 - DNA, 16 bp, Artificial sequence
  Synthetic oligonucleotide
gcgaaaccgtaggagt

SEQ ID NO: 4834 - DNA, 16 bp, Artificial sequence
  Synthetic oligonucleotide
atgacaccgctgagaa

SEQ ID NO: 4835 - DNA, 16 bp, Artificial sequence
  Synthetic oligonucleotide
gtttccgcaagatcac

SEQ ID NO: 4836 - DNA, 16 bp, Artificial sequence
  Synthetic oligonucleotide
atgtacgctcagagcc

SEQ ID NO: 4837 - DNA, 16 bp, Artificial sequence
  Synthetic oligonucleotide
gtttgagtttgggatt

SEQ ID NO: 4838 - DNA, 16 bp, Artificial sequence
  Synthetic oligonucleotide
atatacatcttcaatc

SEQ ID NO: 4839 - DNA, 16 bp, Artificial sequence
  Synthetic oligonucleotide
ataggttttataaacc

SEQ ID NO: 4840 - DNA, 16 bp, Artificial sequence
  Synthetic oligonucleotide
ctgatggtcaacataa

SEQ ID NO: 4841 - DNA, 16 bp, Artificial sequence
  Synthetic oligonucleotide
aggctcaacacgaggc

SEQ ID NO: 4842 - DNA, 16 bp, Artificial sequence
  Synthetic oligonucleotide
agttccttagctactt

SEQ ID NO: 4843 - DNA, 16 bp, Artificial sequence
  Synthetic oligonucleotide
attatactgttaggat

SEQ ID NO: 4844 - DNA, 16 bp, Artificial sequence
  Synthetic oligonucleotide
ggagttatcttatttc

SEQ ID NO: 4845 - DNA, 16 bp, Artificial sequence
  Synthetic oligonucleotide
tgaggtggactgggag

SEQ ID NO: 4846 - DNA, 16 bp, Artificial sequence
  Synthetic oligonucleotide
caccagaaaagggctt

SEQ ID NO: 4847 - DNA, 16 bp, Artificial sequence
  Synthetic oligonucleotide
tgttggatgcactggg

SEQ ID NO: 4848 - DNA, 16 bp, Artificial sequence
  Synthetic oligonucleotide
cagaggttcgggcagc

SEQ ID NO: 4849 - DNA, 16 bp, Artificial sequence
  Synthetic oligonucleotide
gtaaagcttcacacag

SEQ ID NO: 4850 - DNA, 16 bp, Artificial sequence
  Synthetic oligonucleotide
gtgtttttgcaagggc

SEQ ID NO: 4851 - DNA, 16 bp, Artificial sequence
  Synthetic oligonucleotide
tgccaatgccacaagc

SEQ ID NO: 4852 - DNA, 16 bp, Artificial sequence
  Synthetic oligonucleotide
ctgtaagggcaagtat

SEQ ID NO: 4853 - DNA, 16 bp, Artificial sequence
  Synthetic oligonucleotide
gtgacgaagatactcc

SEQ ID NO: 4854 - DNA, 16 bp, Artificial sequence
  Synthetic oligonucleotide
agacttgttgtcactg

SEQ ID NO: 4855 - DNA, 16 bp, Artificial sequence
  Synthetic oligonucleotide
gtttagatgattagtg

SEQ ID NO: 4856 - DNA, 16 bp, Artificial sequence
  Synthetic oligonucleotide
gttaattggatttcca

SEQ ID NO: 4857 - DNA, 16 bp, Artificial sequence
  Synthetic oligonucleotide
ctccattctatcttat

SEQ ID NO: 4858 - DNA, 16 bp, Artificial sequence
  Synthetic oligonucleotide
aaagcagttataaacc

SEQ ID NO: 4859 - DNA, 16 bp, Artificial sequence
  Synthetic oligonucleotide
taatagcagcctagct

SEQ ID NO: 4860 - DNA, 16 bp, Artificial sequence
  Synthetic oligonucleotide
gatgaaggctttatga

SEQ ID NO: 4861 - DNA, 16 bp, Artificial sequence
  Synthetic oligonucleotide
ctccgaccgtaagaaa

SEQ ID NO: 4862 - DNA, 16 bp, Artificial sequence
  Synthetic oligonucleotide
ggtcccaaggagtcta

SEQ ID NO: 4863 - DNA, 16 bp, Artificial sequence
  Synthetic oligonucleotide
ctagacccagccaagc

SEQ ID NO: 4864 - DNA, 16 bp, Artificial sequence
  Synthetic oligonucleotide
cttagcatcagaaggg

SEQ ID NO: 4865 - DNA, 16 bp, Artificial sequence
  Synthetic oligonucleotide
gttggtataaaatcag

SEQ ID NO: 4866 - DNA, 16 bp, Artificial sequence
  Synthetic oligonucleotide
taatgcatcttagtcc

SEQ ID NO: 4867 - DNA, 16 bp, Artificial sequence
  Synthetic oligonucleotide
cccctttaacgggaac

SEQ ID NO: 4868 - DNA, 16 bp, Artificial sequence
  Synthetic oligonucleotide
cgccaaagctgcgctg

SEQ ID NO: 4869 - DNA, 16 bp, Artificial sequence
  Synthetic oligonucleotide
ctcaaacacaaactcg

SEQ ID NO: 4870 - DNA, 16 bp, Artificial sequence
  Synthetic oligonucleotide
ggaacagctgtcccga

SEQ ID NO: 4871 - DNA, 16 bp, Artificial sequence
  Synthetic oligonucleotide
cactgggccgagcgac

SEQ ID NO: 4872 - DNA, 16 bp, Artificial sequence
  Synthetic oligonucleotide
atagaacatatcatag

SEQ ID NO: 4873 - DNA, 16 bp, Artificial sequence
  Synthetic oligonucleotide
tgtaagatgctaggca

SEQ ID NO: 4874 - DNA, 16 bp, Artificial sequence
  Synthetic oligonucleotide
accagaggcggctgag

SEQ ID NO: 4875 - DNA, 16 bp, Artificial sequence
  Synthetic oligonucleotide
cagtgagctagcccca

SEQ ID NO: 4876 - DNA, 16 bp, Artificial sequence
  Synthetic oligonucleotide
taataagatggccagg

SEQ ID NO: 4877 - DNA, 16 bp, Artificial sequence
  Synthetic oligonucleotide
acctcctagagttctt

SEQ ID NO: 4878 - DNA, 16 bp, Artificial sequence
  Synthetic oligonucleotide
ctaaagctctggccgg

SEQ ID NO: 4879 - DNA, 16 bp, Artificial sequence
  Synthetic oligonucleotide
catacaaatatgtacg

SEQ ID NO: 4880 - DNA, 16 bp, Artificial sequence
  Synthetic oligonucleotide
atgcaatggatatgat

SEQ ID NO: 4881 - DNA, 16 bp, Artificial sequence
  Synthetic oligonucleotide
gttctagctgctgctc

SEQ ID NO: 4882 - DNA, 16 bp, Artificial sequence
  Synthetic oligonucleotide
cccacactttggtttt

SEQ ID NO: 4883 - DNA, 16 bp, Artificial sequence
  Synthetic oligonucleotide
tggtaaatccatagca

SEQ ID NO: 4884 - DNA, 16 bp, Artificial sequence
  Synthetic oligonucleotide
atacatctacagttgg

SEQ ID NO: 4885 - DNA, 16 bp, Artificial sequence
  Synthetic oligonucleotide
gttccctggtggtgct

SEQ ID NO: 4886 - DNA, 16 bp, Artificial sequence
  Synthetic oligonucleotide
gagcattctggcggca

SEQ ID NO: 4887 - DNA, 16 bp, Artificial sequence
  Synthetic oligonucleotide
gatgatactcagcaac

SEQ ID NO: 4888 - DNA, 16 bp, Artificial sequence
  Synthetic oligonucleotide
agacgaacagcagcac

SEQ ID NO: 4889 - DNA, 16 bp, Artificial sequence
  Synthetic oligonucleotide
gcccacgatccattgg

SEQ ID NO: 4890 - DNA, 16 bp, Artificial sequence
  Synthetic oligonucleotide
tacagttctgccagag

SEQ ID NO: 4891 - DNA, 16 bp, Artificial sequence
  Synthetic oligonucleotide
acagtggtggacattt

SEQ ID NO: 4892 - DNA, 16 bp, Artificial sequence
  Synthetic oligonucleotide
acagactgcagccatt

SEQ ID NO: 4893 - DNA, 16 bp, Artificial sequence
  Synthetic oligonucleotide
atcgacaggatcatgg

SEQ ID NO: 4894 - DNA, 16 bp, Artificial sequence
  Synthetic oligonucleotide
ttggcagaagaacagg

SEQ ID NO: 4895 - DNA, 16 bp, Artificial sequence
  Synthetic oligonucleotide
gtaaaacctgcccccc

SEQ ID NO: 4896 - DNA, 16 bp, Artificial sequence
  Synthetic oligonucleotide
ttggaagattccagtg

SEQ ID NO: 4897 - DNA, 16 bp, Artificial sequence
  Synthetic oligonucleotide
catcacgcacagacca

SEQ ID NO: 4898 - DNA, 16 bp, Artificial sequence
  Synthetic oligonucleotide
gcctcaccgtgtagat

SEQ ID NO: 4899 - DNA, 16 bp, Artificial sequence
  Synthetic oligonucleotide
tccgagttgagatgcc

SEQ ID NO: 4900 - DNA, 16 bp, Artificial sequence
  Synthetic oligonucleotide
aggcgaaaccgtagga

SEQ ID NO: 4901 - DNA, 16 bp, Artificial sequence
  Synthetic oligonucleotide
gatgacaccgctgaga

SEQ ID NO: 4902 - DNA, 16 bp, Artificial sequence
  Synthetic oligonucleotide
cagaccgtctgggcgc

SEQ ID NO: 4903 - DNA, 16 bp, Artificial sequence
  Synthetic oligonucleotide
ccctatgtacgctcag

SEQ ID NO: 4904 - DNA, 16 bp, Artificial sequence
  Synthetic oligonucleotide
gctgatggtcaacata

SEQ ID NO: 4905 - DNA, 16 bp, Artificial sequence
  Synthetic oligonucleotide
ctttaaggctcaacac

SEQ ID NO: 4906 - DNA, 16 bp, Artificial sequence
  Synthetic oligonucleotide
tgtaaagttccttagc

SEQ ID NO: 4907 - DNA, 16 bp, Artificial sequence
  Synthetic oligonucleotide
gctggattatactgtt

SEQ ID NO: 4908 - DNA, 16 bp, Artificial sequence
  Synthetic oligonucleotide
atggagttatcttatt

SEQ ID NO: 4909 - DNA, 16 bp, Artificial sequence
  Synthetic oligonucleotide
aatgaggtggactggg

SEQ ID NO: 4910 - DNA, 16 bp, Artificial sequence
  Synthetic oligonucleotide
tctacccacactttgg

SEQ ID NO: 4911 - DNA, 16 bp, Artificial sequence
  Synthetic oligonucleotide
tttctgttggatgcac

SEQ ID NO: 4912 - DNA, 16 bp, Artificial sequence
  Synthetic oligonucleotide
acagaggttcgggcag

SEQ ID NO: 4913 - DNA, 16 bp, Artificial sequence
  Synthetic oligonucleotide
tttgtccgtgtgcgcg

SEQ ID NO: 4914 - DNA, 16 bp, Artificial sequence
  Synthetic oligonucleotide
aagccgtgtttttgca

SEQ ID NO: 4915 - DNA, 16 bp, Artificial sequence
  Synthetic oligonucleotide
gtatgccaatgccaca

SEQ ID NO: 4916 - DNA, 16 bp, Artificial sequence
  Synthetic oligonucleotide
cacctgtaagggcaag

SEQ ID NO: 4917 - DNA, 16 bp, Artificial sequence
  Synthetic oligonucleotide
agatgtgtgacgaaga

SEQ ID NO: 4918 - DNA, 16 bp, Artificial sequence
  Synthetic oligonucleotide
ttcaaagacttgttgt

SEQ ID NO: 4919 - DNA, 16 bp, Artificial sequence
  Synthetic oligonucleotide
aatggtaaatccatag

SEQ ID NO: 4920 - DNA, 16 bp, Artificial sequence
  Synthetic oligonucleotide
agttgtttagatgatt

SEQ ID NO: 4921 - DNA, 16 bp, Artificial sequence
  Synthetic oligonucleotide
ggtctccattctatct

SEQ ID NO: 4922 - DNA, 16 bp, Artificial sequence
  Synthetic oligonucleotide
gtacaaaagcagttat

SEQ ID NO: 4923 - DNA, 16 bp, Artificial sequence
  Synthetic oligonucleotide
taataatagcagccta

SEQ ID NO: 4924 - DNA, 16 bp, Artificial sequence
  Synthetic oligonucleotide
atgctccgaccgtaag

SEQ ID NO: 4925 - DNA, 16 bp, Artificial sequence
  Synthetic oligonucleotide
agcctagacccagcca

SEQ ID NO: 4926 - DNA, 16 bp, Artificial sequence
  Synthetic oligonucleotide
aatacaagtcattgcc

SEQ ID NO: 4927 - DNA, 16 bp, Artificial sequence
  Synthetic oligonucleotide
gtcttagcatcagaag

SEQ ID NO: 4928 - DNA, 16 bp, Artificial sequence
  Synthetic oligonucleotide
cgttcccctttaacgg

SEQ ID NO: 4929 - DNA, 16 bp, Artificial sequence
  Synthetic oligonucleotide
ccgccaaagctgcgct

SEQ ID NO: 4930 - DNA, 16 bp, Artificial sequence
  Synthetic oligonucleotide
gtggcctcaaacacaa

SEQ ID NO: 4931 - DNA, 16 bp, Artificial sequence
  Synthetic oligonucleotide
aaaggaacagctgtcc

SEQ ID NO: 4932 - DNA, 16 bp, Artificial sequence
  Synthetic oligonucleotide
agggtcccgcgcacta

SEQ ID NO: 4933 - DNA, 16 bp, Artificial sequence
  Synthetic oligonucleotide
acgcactgggccgagc

SEQ ID NO: 4934 - DNA, 16 bp, Artificial sequence
  Synthetic oligonucleotide
atgtaagatgctaggc

SEQ ID NO: 4935 - DNA, 16 bp, Artificial sequence
  Synthetic oligonucleotide
ccacagggactgtttt

SEQ ID NO: 4936 - DNA, 16 bp, Artificial sequence
  Synthetic oligonucleotide
gattatgcaaagccag

SEQ ID NO: 4937 - DNA, 16 bp, Artificial sequence
  Synthetic oligonucleotide
atggagagactcccga

SEQ ID NO: 4938 - DNA, 16 bp, Artificial sequence
  Synthetic oligonucleotide
gtttaacaaggtaatt

SEQ ID NO: 4939 - DNA, 16 bp, Artificial sequence
  Synthetic oligonucleotide
caattcatatctcctc

SEQ ID NO: 4940 - DNA, 16 bp, Artificial sequence
  Synthetic oligonucleotide
ccaaaacgaacaaatg

SEQ ID NO: 4941 - DNA, 16 bp, Artificial sequence
  Synthetic oligonucleotide
taagtcccaagttcta

SEQ ID NO: 4942 - DNA, 16 bp, Artificial sequence
  Synthetic oligonucleotide
gcctaaaatgatgtaa

SEQ ID NO: 4943 - DNA, 16 bp, Artificial sequence
  Synthetic oligonucleotide
gatgttttagggaata

SEQ ID NO: 4944 - DNA, 16 bp, Artificial sequence
  Synthetic oligonucleotide
ttgttaattggatttc

SEQ ID NO: 4945 - DNA, 16 bp, Artificial sequence
  Synthetic oligonucleotide
ttaatgcatcttagtc

SEQ ID NO: 4946 - DNA, 16 bp, Artificial sequence
  Synthetic oligonucleotide
ctcagcggagtttctg

SEQ ID NO: 4947 - DNA, 16 bp, Artificial sequence
  Synthetic oligonucleotide
aggagcattctggcgg

SEQ ID NO: 4948 - DNA, 16 bp, Artificial sequence
  Synthetic oligonucleotide
gacgatgatactcagc

SEQ ID NO: 4949 - DNA, 16 bp, Artificial sequence
  Synthetic oligonucleotide
ggagacgaacagcagc

SEQ ID NO: 4950 - DNA, 16 bp, Artificial sequence
  Synthetic oligonucleotide
ccattgcccacgatcc

SEQ ID NO: 4951 - DNA, 16 bp, Artificial sequence
  Synthetic oligonucleotide
ctacagttctgccaga

SEQ ID NO: 4952 - DNA, 16 bp, Artificial sequence
  Synthetic oligonucleotide
agaaacagtggtggac

SEQ ID NO: 4953 - DNA, 16 bp, Artificial sequence
  Synthetic oligonucleotide
tggacagactgcagcc

SEQ ID NO: 4954 - DNA, 16 bp, Artificial sequence
  Synthetic oligonucleotide
gatgatcgacaggatc

SEQ ID NO: 4955 - DNA, 16 bp, Artificial sequence
  Synthetic oligonucleotide
gggtgaagagttggca

SEQ ID NO: 4956 - DNA, 16 bp, Artificial sequence
  Synthetic oligonucleotide
gatgtaaaacctgccc

SEQ ID NO: 4957 - DNA, 16 bp, Artificial sequence
  Synthetic oligonucleotide
atttggaagattccag

SEQ ID NO: 4958 - DNA, 16 bp, Artificial sequence
  Synthetic oligonucleotide
actcatcacgcacaga

SEQ ID NO: 4959 - DNA, 16 bp, Artificial sequence
  Synthetic oligonucleotide
cgggtgcctcaccgtg

SEQ ID NO: 4960 - DNA, 16 bp, Artificial sequence
  Synthetic oligonucleotide
atccgagttgagatgc

SEQ ID NO: 4961 - DNA, 16 bp, Artificial sequence
  Synthetic oligonucleotide
atgtaggcgaaaccgt

SEQ ID NO: 4962 - DNA, 16 bp, Artificial sequence
  Synthetic oligonucleotide
catagatgacaccgct

SEQ ID NO: 4963 - DNA, 16 bp, Artificial sequence
  Synthetic oligonucleotide
agacagaccgtctggg

SEQ ID NO: 4964 - DNA, 16 bp, Artificial sequence
  Synthetic oligonucleotide
tccctatgtacgctca

SEQ ID NO: 4965 - DNA, 16 bp, Artificial sequence
  Synthetic oligonucleotide
tcttcaatcaacagca

SEQ ID NO: 4966 - DNA, 16 bp, Artificial sequence
  Synthetic oligonucleotide
aaccggagatattata

SEQ ID NO: 4967 - DNA, 16 bp, Artificial sequence
  Synthetic oligonucleotide
cgaggctgatggtcaa

SEQ ID NO: 4968 - DNA, 16 bp, Artificial sequence
  Synthetic oligonucleotide
tacttctttaaggctc

SEQ ID NO: 4969 - DNA, 16 bp, Artificial sequence
  Synthetic oligonucleotide
taggatgtaaagttcc

SEQ ID NO: 4970 - DNA, 16 bp, Artificial sequence
  Synthetic oligonucleotide
gagatggagttatctt

SEQ ID NO: 4971 - DNA, 16 bp, Artificial sequence
  Synthetic oligonucleotide
ctaaatgaggtggact

SEQ ID NO: 4972 - DNA, 16 bp, Artificial sequence
  Synthetic oligonucleotide
ttctacccacactttg

SEQ ID NO: 4973 - DNA, 16 bp, Artificial sequence
  Synthetic oligonucleotide
gtcacccaccagaaaa

SEQ ID NO: 4974 - DNA, 16 bp, Artificial sequence
  Synthetic oligonucleotide
gtttctgttggatgca

SEQ ID NO: 4975 - DNA, 16 bp, Artificial sequence
  Synthetic oligonucleotide
cacacagaggttcggg

SEQ ID NO: 4976 - DNA, 16 bp, Artificial sequence
  Synthetic oligonucleotide
cagtttgggcattttg

SEQ ID NO: 4977 - DNA, 16 bp, Artificial sequence
  Synthetic oligonucleotide
cacaagccgtgttttt

SEQ ID NO: 4978 - DNA, 16 bp, Artificial sequence
  Synthetic oligonucleotide
aagtatgccaatgcca

SEQ ID NO: 4979 - DNA, 16 bp, Artificial sequence
  Synthetic oligonucleotide
actccacctgtaaggg

SEQ ID NO: 4980 - DNA, 16 bp, Artificial sequence
  Synthetic oligonucleotide
tttagatgtgtgacga

SEQ ID NO: 4981 - DNA, 16 bp, Artificial sequence
  Synthetic oligonucleotide
gcaccatttcaaagac

SEQ ID NO: 4982 - DNA, 16 bp, Artificial sequence
  Synthetic oligonucleotide
aaggaatggtaaatcc

SEQ ID NO: 4983 - DNA, 16 bp, Artificial sequence
  Synthetic oligonucleotide
tgagttgtttagatga

SEQ ID NO: 4984 - DNA, 16 bp, Artificial sequence
  Synthetic oligonucleotide
gtaaaattgttaattg

SEQ ID NO: 4985 - DNA, 16 bp, Artificial sequence
  Synthetic oligonucleotide
tattcaggtctccatt

SEQ ID NO: 4986 - DNA, 16 bp, Artificial sequence
  Synthetic oligonucleotide
taggtacaaaagcagt

SEQ ID NO: 4987 - DNA, 16 bp, Artificial sequence
  Synthetic oligonucleotide
tactcattatagtaat

SEQ ID NO: 4988 - DNA, 16 bp, Artificial sequence
  Synthetic oligonucleotide
gtgggagtgatgaagg

SEQ ID NO: 4989 - DNA, 16 bp, Artificial sequence
  Synthetic oligonucleotide
ttctgatgctccgacc

SEQ ID NO: 4990 - DNA, 16 bp, Artificial sequence
  Synthetic oligonucleotide
aggaactcacggtccc

SEQ ID NO: 4991 - DNA, 16 bp, Artificial sequence
  Synthetic oligonucleotide
cagcctagacccagcc

SEQ ID NO: 4992 - DNA, 16 bp, Artificial sequence
  Synthetic oligonucleotide
agacagtccttggagg

SEQ ID NO: 4993 - DNA, 16 bp, Artificial sequence
  Synthetic oligonucleotide
gccaatacaagtcatt

SEQ ID NO: 4994 - DNA, 16 bp, Artificial sequence
  Synthetic oligonucleotide
gcaccatatatacatc

SEQ ID NO: 4995 - DNA, 16 bp, Artificial sequence
  Synthetic oligonucleotide
ggagtcttagcatcag

SEQ ID NO: 4996 - DNA, 16 bp, Artificial sequence
  Synthetic oligonucleotide
gtccacacagttggta

SEQ ID NO: 4997 - DNA, 16 bp, Artificial sequence
  Synthetic oligonucleotide
tttaatgcatcttagt

SEQ ID NO: 4998 - DNA, 16 bp, Artificial sequence
  Synthetic oligonucleotide
tgggaggctcctggcg

SEQ ID NO: 4999 - DNA, 16 bp, Artificial sequence
  Synthetic oligonucleotide
gctccgctgctggcgc

SEQ ID NO: 5000 - DNA, 16 bp, Artificial sequence
  Synthetic oligonucleotide
atcctcagggtggcct

SEQ ID NO: 5001 - DNA, 16 bp, Artificial sequence
  Synthetic oligonucleotide
gcccaaaggaacagct

SEQ ID NO: 5002 - DNA, 16 bp, Artificial sequence
  Synthetic oligonucleotide
gcgcgcgcagagggag

SEQ ID NO: 5003 - DNA, 16 bp, Artificial sequence
  Synthetic oligonucleotide
aggccgaacgcactgg

SEQ ID NO: 5004 - DNA, 16 bp, Artificial sequence
  Synthetic oligonucleotide
agatgctaggcagaat

SEQ ID NO: 5005 - DNA, 16 bp, Artificial sequence
  Synthetic oligonucleotide
agatgtaagatgtaag

SEQ ID NO: 5006 - DNA, 16 bp, Artificial sequence
  Synthetic oligonucleotide
aagaatggctcgagag

SEQ ID NO: 5007 - DNA, 16 bp, Artificial sequence
  Synthetic oligonucleotide
aacttagcaactcctc

SEQ ID NO: 5008 - DNA, 16 bp, Artificial sequence
  Synthetic oligonucleotide
ggtaaggcagcaaaag

SEQ ID NO: 5009 - DNA, 16 bp, Artificial sequence
  Synthetic oligonucleotide
gaacagaggctccggg

SEQ ID NO: 5010 - DNA, 16 bp, Artificial sequence
  Synthetic oligonucleotide
taacttgccacataca

SEQ ID NO: 5011 - DNA, 16 bp, Artificial sequence
  Synthetic oligonucleotide
gctcaacatataccta

SEQ ID NO: 5012 - DNA, 16 bp, Artificial sequence
  Synthetic oligonucleotide
cacttgccaggttttc

SEQ ID NO: 5013 - DNA, 16 bp, Artificial sequence
  Synthetic oligonucleotide
gacctgccacctacag

SEQ ID NO: 5014 - DNA, 16 bp, Artificial sequence
  Synthetic oligonucleotide
tgagctggattatact

SEQ ID NO: 5015 - DNA, 16 bp, Artificial sequence
  Synthetic oligonucleotide
ttctgctcagcggagt

SEQ ID NO: 5016 - DNA, 16 bp, Artificial sequence
  Synthetic oligonucleotide
caggaggagcattctg

SEQ ID NO: 5017 - DNA, 16 bp, Artificial sequence
  Synthetic oligonucleotide
aggacgatgatactca

SEQ ID NO: 5018 - DNA, 16 bp, Artificial sequence
  Synthetic oligonucleotide
cattggctgacgatcg

SEQ ID NO: 5019 - DNA, 16 bp, Artificial sequence
  Synthetic oligonucleotide
gtccattgcccacgat

SEQ ID NO: 5020 - DNA, 16 bp, Artificial sequence
  Synthetic oligonucleotide
ggtgctacagttctgc

SEQ ID NO: 5021 - DNA, 16 bp, Artificial sequence
  Synthetic oligonucleotide
gatgagaaacagtggt

SEQ ID NO: 5022 - DNA, 16 bp, Artificial sequence
  Synthetic oligonucleotide
tggcctggacagactg

SEQ ID NO: 5023 - DNA, 16 bp, Artificial sequence
  Synthetic oligonucleotide
gaagatgatcgacagg

SEQ ID NO: 5024 - DNA, 16 bp, Artificial sequence
  Synthetic oligonucleotide
cttggtgagggtgaag

SEQ ID NO: 5025 - DNA, 16 bp, Artificial sequence
  Synthetic oligonucleotide
gtgatgtaaaacctgc

SEQ ID NO: 5026 - DNA, 16 bp, Artificial sequence
  Synthetic oligonucleotide
ccagcaagaatttgga

SEQ ID NO: 5027 - DNA, 16 bp, Artificial sequence
  Synthetic oligonucleotide
gcagcactcatcacgc

SEQ ID NO: 5028 - DNA, 16 bp, Artificial sequence
  Synthetic oligonucleotide
cactccgggtgcctca

SEQ ID NO: 5029 - DNA, 16 bp, Artificial sequence
  Synthetic oligonucleotide
agtaatccgagttgag

SEQ ID NO: 5030 - DNA, 16 bp, Artificial sequence
  Synthetic oligonucleotide
gccaggatgtaggcga

SEQ ID NO: 5031 - DNA, 16 bp, Artificial sequence
  Synthetic oligonucleotide
tcacatagatgacacc

SEQ ID NO: 5032 - DNA, 16 bp, Artificial sequence
  Synthetic oligonucleotide
cctcagacagaccgtc

SEQ ID NO: 5033 - DNA, 16 bp, Artificial sequence
  Synthetic oligonucleotide
tcccttccctatgtac

SEQ ID NO: 5034 - DNA, 16 bp, Artificial sequence
  Synthetic oligonucleotide
ataaaccggagatatt

SEQ ID NO: 5035 - DNA, 16 bp, Artificial sequence
  Synthetic oligonucleotide
caaacaatactatgta

SEQ ID NO: 5036 - DNA, 16 bp, Artificial sequence
  Synthetic oligonucleotide
cacgaggctgatggtc

SEQ ID NO: 5037 - DNA, 16 bp, Artificial sequence
  Synthetic oligonucleotide
agctacttctttaagg

SEQ ID NO: 5038 - DNA, 16 bp, Artificial sequence
  Synthetic oligonucleotide
actgagctggattata

SEQ ID NO: 5039 - DNA, 16 bp, Artificial sequence
  Synthetic oligonucleotide
ggtatcttctttcaga

SEQ ID NO: 5040 - DNA, 16 bp, Artificial sequence
  Synthetic oligonucleotide
tttctaaatgaggtgg

SEQ ID NO: 5041 - DNA, 16 bp, Artificial sequence
  Synthetic oligonucleotide
gggtttctacccacac

SEQ ID NO: 5042 - DNA, 16 bp, Artificial sequence
  Synthetic oligonucleotide
actgggtcacccacca

SEQ ID NO: 5043 - DNA, 16 bp, Artificial sequence
  Synthetic oligonucleotide
cggctgtttctgttgg

SEQ ID NO: 5044 - DNA, 16 bp, Artificial sequence
  Synthetic oligonucleotide
ctccagtttgggcatt

SEQ ID NO: 5045 - DNA, 16 bp, Artificial sequence
  Synthetic oligonucleotide
gccacaagccgtgttt

SEQ ID NO: 5046 - DNA, 16 bp, Artificial sequence
  Synthetic oligonucleotide
ggcaagtatgccaatg

SEQ ID NO: 5047 - DNA, 16 bp, Artificial sequence
  Synthetic oligonucleotide
tactccacctgtaagg

SEQ ID NO: 5048 - DNA, 16 bp, Artificial sequence
  Synthetic oligonucleotide
tctcatttagatgtgt

SEQ ID NO: 5049 - DNA, 16 bp, Artificial sequence
  Synthetic oligonucleotide
ccatagcaccatttca

SEQ ID NO: 5050 - DNA, 16 bp, Artificial sequence
  Synthetic oligonucleotide
gataataaggaatggt

SEQ ID NO: 5051 - DNA, 16 bp, Artificial sequence
  Synthetic oligonucleotide
cagtgagttgtttaga

SEQ ID NO: 5052 - DNA, 16 bp, Artificial sequence
  Synthetic oligonucleotide
ctatcttatgttgtaa

SEQ ID NO: 5053 - DNA, 16 bp, Artificial sequence
  Synthetic oligonucleotide
agctaggtacaaaagc

SEQ ID NO: 5054 - DNA, 16 bp, Artificial sequence
  Synthetic oligonucleotide
gatttactcattatag

SEQ ID NO: 5055 - DNA, 16 bp, Artificial sequence
  Synthetic oligonucleotide
cgtaagaaaaatgtgg

SEQ ID NO: 5056 - DNA, 16 bp, Artificial sequence
  Synthetic oligonucleotide
gcttgttctgatgctc

SEQ ID NO: 5057 - DNA, 16 bp, Artificial sequence
  Synthetic oligonucleotide
ctctaggaactcacgg

SEQ ID NO: 5058 - DNA, 16 bp, Artificial sequence
  Synthetic oligonucleotide
aacagcctagacccag

SEQ ID NO: 5059 - DNA, 16 bp, Artificial sequence
  Synthetic oligonucleotide
ccagacagtccttgga

SEQ ID NO: 5060 - DNA, 16 bp, Artificial sequence
  Synthetic oligonucleotide
gtggccaatacaagtc

SEQ ID NO: 5061 - DNA, 16 bp, Artificial sequence
  Synthetic oligonucleotide
gaagggcaccatatat

SEQ ID NO: 5062 - DNA, 16 bp, Artificial sequence
  Synthetic oligonucleotide
ggtctggagtcttagc

SEQ ID NO: 5063 - DNA, 16 bp, Artificial sequence
  Synthetic oligonucleotide
tagtccacacagttgg

SEQ ID NO: 5064 - DNA, 16 bp, Artificial sequence
  Synthetic oligonucleotide
gttactctgatgttta

SEQ ID NO: 5065 - DNA, 16 bp, Artificial sequence
  Synthetic oligonucleotide
gcgcgcgaagcaaggg

SEQ ID NO: 5066 - DNA, 16 bp, Artificial sequence
  Synthetic oligonucleotide
cgttggctccgctgct

SEQ ID NO: 5067 - DNA, 16 bp, Artificial sequence
  Synthetic oligonucleotide
tcccgatcctcagggt

SEQ ID NO: 5068 - DNA, 16 bp, Artificial sequence
  Synthetic oligonucleotide
tacagcccaaaggaac

SEQ ID NO: 5069 - DNA, 16 bp, Artificial sequence
  Synthetic oligonucleotide
acggaggcgcgcgcag

SEQ ID NO: 5070 - DNA, 16 bp, Artificial sequence
  Synthetic oligonucleotide
cctgcgaggagagcgc

SEQ ID NO: 5071 - DNA, 16 bp, Artificial sequence
  Synthetic oligonucleotide
aagatgctaggcagaa

SEQ ID NO: 5072 - DNA, 16 bp, Artificial sequence
  Synthetic oligonucleotide
gtaagatgtaagatgt

SEQ ID NO: 5073 - DNA, 16 bp, Artificial sequence
  Synthetic oligonucleotide
ccacacccagagcccg

SEQ ID NO: 5074 - DNA, 16 bp, Artificial sequence
  Synthetic oligonucleotide
actcacgctgacgatc

SEQ ID NO: 5075 - DNA, 16 bp, Artificial sequence
  Synthetic oligonucleotide
gattacttaacaagta

SEQ ID NO: 5076 - DNA, 16 bp, Artificial sequence
  Synthetic oligonucleotide
cacctcagcatgaaaa

SEQ ID NO: 5077 - DNA, 16 bp, Artificial sequence
  Synthetic oligonucleotide
ttatacccttgttgga

SEQ ID NO: 5078 - DNA, 16 bp, Artificial sequence
  Synthetic oligonucleotide
actgttgcaacgaaga

SEQ ID NO: 5079 - DNA, 16 bp, Artificial sequence
  Synthetic oligonucleotide
gattaagacattttgg

SEQ ID NO: 5080 - DNA, 16 bp, Artificial sequence
  Synthetic oligonucleotide
acctgaatactgtctt

SEQ ID NO: 5081 - DNA, 16 bp, Artificial sequence
  Synthetic oligonucleotide
cagtatgactgggaag

SEQ ID NO: 5082 - DNA, 16 bp, Artificial sequence
  Synthetic oligonucleotide
tgttaggatgtaaagt

SEQ ID NO: 5083 - DNA, 16 bp, Artificial sequence
  Synthetic oligonucleotide
tcacacagaggttcgg

SEQ ID NO: 5084 - DNA, 16 bp, Artificial sequence
  Synthetic oligonucleotide
tcatggtggcctggac

SEQ ID NO: 5085 - DNA, 16 bp, Artificial sequence
  Synthetic oligonucleotide
gcaagttctgctcagc

SEQ ID NO: 5086 - DNA, 16 bp, Artificial sequence
  Synthetic oligonucleotide
caacaggaggagcatt

SEQ ID NO: 5087 - DNA, 16 bp, Artificial sequence
  Synthetic oligonucleotide
cgtggaggacgatgat

SEQ ID NO: 5088 - DNA, 16 bp, Artificial sequence
  Synthetic oligonucleotide
atccattggctgacga

SEQ ID NO: 5089 - DNA, 16 bp, Artificial sequence
  Synthetic oligonucleotide
cgtgtccattgcccac

SEQ ID NO: 5090 - DNA, 16 bp, Artificial sequence
  Synthetic oligonucleotide
gaagaggtgctacagt

SEQ ID NO: 5091 - DNA, 16 bp, Artificial sequence
  Synthetic oligonucleotide
ggtgatgatgagaaac

SEQ ID NO: 5092 - DNA, 16 bp, Artificial sequence
  Synthetic oligonucleotide
gctgaagatgatcgac

SEQ ID NO: 5093 - DNA, 16 bp, Artificial sequence
  Synthetic oligonucleotide
ccccccttggtgaggg

SEQ ID NO: 5094 - DNA, 16 bp, Artificial sequence
  Synthetic oligonucleotide
agtgatgtaaaacctg

SEQ ID NO: 5095 - DNA, 16 bp, Artificial sequence
  Synthetic oligonucleotide
agaccagcaagaattt

SEQ ID NO: 5096 - DNA, 16 bp, Artificial sequence
  Synthetic oligonucleotide
tggccgcagcactcat

SEQ ID NO: 5097 - DNA, 16 bp, Artificial sequence
  Synthetic oligonucleotide
gatgccactccgggtg

SEQ ID NO: 5098 - DNA, 16 bp, Artificial sequence
  Synthetic oligonucleotide
gtaggagtaatccgag

SEQ ID NO: 5099 - DNA, 16 bp, Artificial sequence
  Synthetic oligonucleotide
accgctgagaagggcc

SEQ ID NO: 5100 - DNA, 16 bp, Artificial sequence
  Synthetic oligonucleotide
gcaagatcacatagat

SEQ ID NO: 5101 - DNA, 16 bp, Artificial sequence
  Synthetic oligonucleotide
cgctcagagcctcaga

SEQ ID NO: 5102 - DNA, 16 bp, Artificial sequence
  Synthetic oligonucleotide
gctagctcttttttct

SEQ ID NO: 5103 - DNA, 16 bp, Artificial sequence
  Synthetic oligonucleotide
tttataaaccggagat

SEQ ID NO: 5104 - DNA, 16 bp, Artificial sequence
  Synthetic oligonucleotide
ggtcaacataaaaagc

SEQ ID NO: 5105 - DNA, 16 bp, Artificial sequence
  Synthetic oligonucleotide
caacacgaggctgatg

SEQ ID NO: 5106 - DNA, 16 bp, Artificial sequence
  Synthetic oligonucleotide
cttagctacttcttta

SEQ ID NO: 5107 - DNA, 16 bp, Artificial sequence
  Synthetic oligonucleotide
ctgttaggatgtaaag

SEQ ID NO: 5108 - DNA, 16 bp, Artificial sequence
  Synthetic oligonucleotide
aatactgagctggatt

SEQ ID NO: 5109 - DNA, 16 bp, Artificial sequence
  Synthetic oligonucleotide
aggtatcttctttcag

SEQ ID NO: 5110 - DNA, 16 bp, Artificial sequence
  Synthetic oligonucleotide
ggttttctaaatgagg

SEQ ID NO: 5111 - DNA, 16 bp, Artificial sequence
  Synthetic oligonucleotide
gcttttggacatttgg

SEQ ID NO: 5112 - DNA, 16 bp, Artificial sequence
  Synthetic oligonucleotide
atgcactgggtcaccc

SEQ ID NO: 5113 - DNA, 16 bp, Artificial sequence
  Synthetic oligonucleotide
ggcagcggctgtttct

SEQ ID NO: 5114 - DNA, 16 bp, Artificial sequence
  Synthetic oligonucleotide
cttcacacagaggttc

SEQ ID NO: 5115 - DNA, 16 bp, Artificial sequence
  Synthetic oligonucleotide
aagggctccagtttgg

SEQ ID NO: 5116 - DNA, 16 bp, Artificial sequence
  Synthetic oligonucleotide
aatgccacaagccgtg

SEQ ID NO: 5117 - DNA, 16 bp, Artificial sequence
  Synthetic oligonucleotide
gggcaagtatgccaat

SEQ ID NO: 5118 - DNA, 16 bp, Artificial sequence
  Synthetic oligonucleotide
aagatactccacctgt

SEQ ID NO: 5119 - DNA, 16 bp, Artificial sequence
  Synthetic oligonucleotide
gatttctcatttagat

SEQ ID NO: 5120 - DNA, 16 bp, Artificial sequence
  Synthetic oligonucleotide
atccatagcaccattt

SEQ ID NO: 5121 - DNA, 16 bp, Artificial sequence
  Synthetic oligonucleotide
attagtgataataagg

SEQ ID NO: 5122 - DNA, 16 bp, Artificial sequence
  Synthetic oligonucleotide
ttccagtgagttgttt

SEQ ID NO: 5123 - DNA, 16 bp, Artificial sequence
  Synthetic oligonucleotide
attctatcttatgttg

SEQ ID NO: 5124 - DNA, 16 bp, Artificial sequence
  Synthetic oligonucleotide
agaattattcaggtct

SEQ ID NO: 5125 - DNA, 16 bp, Artificial sequence
  Synthetic oligonucleotide
gcctagctaggtacaa

SEQ ID NO: 5126 - DNA, 16 bp, Artificial sequence
  Synthetic oligonucleotide
gctttatgatttactc

SEQ ID NO: 5127 - DNA, 16 bp, Artificial sequence
  Synthetic oligonucleotide
gaccgtaagaaaaatg

SEQ ID NO: 5128 - DNA, 16 bp, Artificial sequence
  Synthetic oligonucleotide
caaggagtctagacgc

SEQ ID NO: 5129 - DNA, 16 bp, Artificial sequence
  Synthetic oligonucleotide
aagctctaggaactca

SEQ ID NO: 5130 - DNA, 16 bp, Artificial sequence
  Synthetic oligonucleotide
acagaacagcctagac

SEQ ID NO: 5131 - DNA, 16 bp, Artificial sequence
  Synthetic oligonucleotide
cattgccagacagtcc

SEQ ID NO: 5132 - DNA, 16 bp, Artificial sequence
  Synthetic oligonucleotide
agttggtggccaatac

SEQ ID NO: 5133 - DNA, 16 bp, Artificial sequence
  Synthetic oligonucleotide
tcagaagggcaccata

SEQ ID NO: 5134 - DNA, 16 bp, Artificial sequence
  Synthetic oligonucleotide
aaggtctggagtctta

SEQ ID NO: 5135 - DNA, 16 bp, Artificial sequence
  Synthetic oligonucleotide
atcttagtccacacag

SEQ ID NO: 5136 - DNA, 16 bp, Artificial sequence
  Synthetic oligonucleotide
agttactctgatgttt

SEQ ID NO: 5137 - DNA, 16 bp, Artificial sequence
  Synthetic oligonucleotide
tgcgcgcgcgcgaagc

SEQ ID NO: 5138 - DNA, 16 bp, Artificial sequence
  Synthetic oligonucleotide
cacaaactcgggtgcg

SEQ ID NO: 5139 - DNA, 16 bp, Artificial sequence
  Synthetic oligonucleotide
agctgtcccgatcctc

SEQ ID NO: 5140 - DNA, 16 bp, Artificial sequence
  Synthetic oligonucleotide
agcgacggaggcgcgc

SEQ ID NO: 5141 - DNA, 16 bp, Artificial sequence
  Synthetic oligonucleotide
ttctgcctgcgaggag

SEQ ID NO: 5142 - DNA, 16 bp, Artificial sequence
  Synthetic oligonucleotide
taagatgctaggcaga

SEQ ID NO: 5143 - DNA, 16 bp, Artificial sequence
  Synthetic oligonucleotide
gatgtaagatgtaaga

SEQ ID NO: 5144 - DNA, 16 bp, Artificial sequence
  Synthetic oligonucleotide
aattgccaccactatt

SEQ ID NO: 5145 - DNA, 16 bp, Artificial sequence
  Synthetic oligonucleotide
ttacaatgtgccttaa

SEQ ID NO: 5146 - DNA, 16 bp, Artificial sequence
  Synthetic oligonucleotide
acgaatatccccacac

SEQ ID NO: 5147 - DNA, 16 bp, Artificial sequence
  Synthetic oligonucleotide
aaatccagagccattc

SEQ ID NO: 5148 - DNA, 16 bp, Artificial sequence
  Synthetic oligonucleotide
gcccaaacctcccaac

SEQ ID NO: 5149 - DNA, 16 bp, Artificial sequence
  Synthetic oligonucleotide
aaaggtgcccaacctc

SEQ ID NO: 5150 - DNA, 16 bp, Artificial sequence
  Synthetic oligonucleotide
gataatgttctcataa

SEQ ID NO: 5151 - DNA, 16 bp, Artificial sequence
  Synthetic oligonucleotide
aaggcaccccactaat

SEQ ID NO: 5152 - DNA, 16 bp, Artificial sequence
  Synthetic oligonucleotide
catcttcaatcaacag

SEQ ID NO: 5153 - DNA, 16 bp, Artificial sequence
  Synthetic oligonucleotide
tggcggcaagttctgc

SEQ ID NO: 5154 - DNA, 16 bp, Artificial sequence
  Synthetic oligonucleotide
actcagcaacaggagg

SEQ ID NO: 5155 - DNA, 16 bp, Artificial sequence
  Synthetic oligonucleotide
caccagcaccgcgacg

SEQ ID NO: 5156 - DNA, 16 bp, Artificial sequence
  Synthetic oligonucleotide
cgatccattggctgac

SEQ ID NO: 5157 - DNA, 16 bp, Artificial sequence
  Synthetic oligonucleotide
ccagagatcagttgcg

SEQ ID NO: 5158 - DNA, 16 bp, Artificial sequence
  Synthetic oligonucleotide
ggacatttcctgagga

SEQ ID NO: 5159 - DNA, 16 bp, Artificial sequence
  Synthetic oligonucleotide
cgtttggtgatgatga

SEQ ID NO: 5160 - DNA, 16 bp, Artificial sequence
  Synthetic oligonucleotide
gatcatggtggcctgg

SEQ ID NO: 5161 - DNA, 16 bp, Artificial sequence
  Synthetic oligonucleotide
aatgctgaagatgatc

SEQ ID NO: 5162 - DNA, 16 bp, Artificial sequence
  Synthetic oligonucleotide
acctgccccccttggt

SEQ ID NO: 5163 - DNA, 16 bp, Artificial sequence
  Synthetic oligonucleotide
gattccagtgatgtaa

SEQ ID NO: 5164 - DNA, 16 bp, Artificial sequence
  Synthetic oligonucleotide
gcacagaccagcaaga

SEQ ID NO: 5165 - DNA, 16 bp, Artificial sequence
  Synthetic oligonucleotide
gtagatggccgcagca

SEQ ID NO: 5166 - DNA, 16 bp, Artificial sequence
  Synthetic oligonucleotide
gttgagatgccactcc

SEQ ID NO: 5167 - DNA, 16 bp, Artificial sequence
  Synthetic oligonucleotide
aaccgtaggagtaatc

SEQ ID NO: 5168 - DNA, 16 bp, Artificial sequence
  Synthetic oligonucleotide
acaccgctgagaaggg

SEQ ID NO: 5169 - DNA, 16 bp, Artificial sequence
  Synthetic oligonucleotide
cgcaagatcacataga

SEQ ID NO: 5170 - DNA, 16 bp, Artificial sequence
  Synthetic oligonucleotide
acgctcagagcctcag

SEQ ID NO: 5171 - DNA, 16 bp, Artificial sequence
  Synthetic oligonucleotide
tttgggctagctcttt

SEQ ID NO: 5172 - DNA, 16 bp, Artificial sequence
  Synthetic oligonucleotide
tatacatcttcaatca

SEQ ID NO: 5173 - DNA, 16 bp, Artificial sequence
  Synthetic oligonucleotide
aggttttataaaccgg

SEQ ID NO: 5174 - DNA, 16 bp, Artificial sequence
  Synthetic oligonucleotide
gatggtcaacataaaa

SEQ ID NO: 5175 - DNA, 16 bp, Artificial sequence
  Synthetic oligonucleotide
gctcaacacgaggctg

SEQ ID NO: 5176 - DNA, 16 bp, Artificial sequence
  Synthetic oligonucleotide
tccttagctacttctt

SEQ ID NO: 5177 - DNA, 16 bp, Artificial sequence
  Synthetic oligonucleotide
atactgttaggatgta

SEQ ID NO: 5178 - DNA, 16 bp, Artificial sequence
  Synthetic oligonucleotide
tatcttatttctgggt

SEQ ID NO: 5179 - DNA, 16 bp, Artificial sequence
  Synthetic oligonucleotide
agggaggtatcttctt

SEQ ID NO: 5180 - DNA, 16 bp, Artificial sequence
  Synthetic oligonucleotide
ccacactttggttttc

SEQ ID NO: 5181 - DNA, 16 bp, Artificial sequence
  Synthetic oligonucleotide
aaagggcttttggaca

SEQ ID NO: 5182 - DNA, 16 bp, Artificial sequence
  Synthetic oligonucleotide
gatgcactgggtcacc

SEQ ID NO: 5183 - DNA, 16 bp, Artificial sequence
  Synthetic oligonucleotide
gttcgggcagcggctg

SEQ ID NO: 5184 - DNA, 16 bp, Artificial sequence
  Synthetic oligonucleotide
aagcttcacacagagg

SEQ ID NO: 5185 - DNA, 16 bp, Artificial sequence
  Synthetic oligonucleotide
ttgcaagggctccagt

SEQ ID NO: 5186 - DNA, 16 bp, Artificial sequence
  Synthetic oligonucleotide
ccaatgccacaagccg

SEQ ID NO: 5187 - DNA, 16 bp, Artificial sequence
  Synthetic oligonucleotide
gtaagggcaagtatgc

SEQ ID NO: 5188 - DNA, 16 bp, Artificial sequence
  Synthetic oligonucleotide
gacgaagatactccac

SEQ ID NO: 5189 - DNA, 16 bp, Artificial sequence
  Synthetic oligonucleotide
cttgttgtcactgatt

SEQ ID NO: 5190 - DNA, 16 bp, Artificial sequence
  Synthetic oligonucleotide
taaatccatagcacca

SEQ ID NO: 5191 - DNA, 16 bp, Artificial sequence
  Synthetic oligonucleotide
agatgattagtgataa

SEQ ID NO: 5192 - DNA, 16 bp, Artificial sequence
  Synthetic oligonucleotide
ggatttccagtgagtt

SEQ ID NO: 5193 - DNA, 16 bp, Artificial sequence
  Synthetic oligonucleotide
ccattctatcttatgt

SEQ ID NO: 5194 - DNA, 16 bp, Artificial sequence
  Synthetic oligonucleotide
gcagttataaaccatt

SEQ ID NO: 5195 - DNA, 16 bp, Artificial sequence
  Synthetic oligonucleotide
tagcagcctagctagg

SEQ ID NO: 5196 - DNA, 16 bp, Artificial sequence
  Synthetic oligonucleotide
tgaaggctttatgatt

SEQ ID NO: 5197 - DNA, 16 bp, Artificial sequence
  Synthetic oligonucleotide
ccgaccgtaagaaaaa

SEQ ID NO: 5198 - DNA, 16 bp, Artificial sequence
  Synthetic oligonucleotide
tcccaaggagtctaga

SEQ ID NO: 5199 - DNA, 16 bp, Artificial sequence
  Synthetic oligonucleotide
agccaagctctaggaa

SEQ ID NO: 5200 - DNA, 16 bp, Artificial sequence
  Synthetic oligonucleotide
cttggaggcacagaac

SEQ ID NO: 5201 - DNA, 16 bp, Artificial sequence
  Synthetic oligonucleotide
agtcattgccagacag

SEQ ID NO: 5202 - DNA, 16 bp, Artificial sequence
  Synthetic oligonucleotide
acagttggtggccaat

SEQ ID NO: 5203 - DNA, 16 bp, Artificial sequence
  Synthetic oligonucleotide
tagcatcagaagggca

SEQ ID NO: 5204 - DNA, 16 bp, Artificial sequence
  Synthetic oligonucleotide
caaaaggtctggagtc

SEQ ID NO: 5205 - DNA, 16 bp, Artificial sequence
  Synthetic oligonucleotide
atgcatcttagtccac

SEQ ID NO: 5206 - DNA, 16 bp, Artificial sequence
  Synthetic oligonucleotide
agtgagttactctgat

SEQ ID NO: 5207 - DNA, 16 bp, Artificial sequence
  Synthetic oligonucleotide
aaagctgcgctgcggg

SEQ ID NO: 5208 - DNA, 16 bp, Artificial sequence
  Synthetic oligonucleotide
aaacacaaactcgggt

SEQ ID NO: 5209 - DNA, 16 bp, Artificial sequence
  Synthetic oligonucleotide
gaacagctgtcccgat

SEQ ID NO: 5210 - DNA, 16 bp, Artificial sequence
  Synthetic oligonucleotide
ggccgagcgacggagg

SEQ ID NO: 5211 - DNA, 16 bp, Artificial sequence
  Synthetic oligonucleotide
ggagtttctgcctgcg

SEQ ID NO: 5212 - DNA, 16 bp, Artificial sequence
  Synthetic oligonucleotide
tagaacatatcataga

SEQ ID NO: 5213 - DNA, 16 bp, Artificial sequence
  Synthetic oligonucleotide
gtaagatgctaggcag

SEQ ID NO: 5214 - DNA, 16 bp, Artificial sequence
  Synthetic oligonucleotide
gcagaggcgcgcccaa

SEQ ID NO: 5215 - DNA, 16 bp, Artificial sequence
  Synthetic oligonucleotide
cttaaaagcaccttgt

SEQ ID NO: 5216 - DNA, 16 bp, Artificial sequence
  Synthetic oligonucleotide
gaccatgtcacatttc

SEQ ID NO: 5217 - DNA, 16 bp, Artificial sequence
  Synthetic oligonucleotide
gttcatctctgtgcac

SEQ ID NO: 5218 - DNA, 16 bp, Artificial sequence
  Synthetic oligonucleotide
gcccagggtaaaaatc

SEQ ID NO: 5219 - DNA, 16 bp, Artificial sequence
  Synthetic oligonucleotide
gtaagagctaatgtaa

SEQ ID NO: 5220 - DNA, 16 bp, Artificial sequence
  Synthetic oligonucleotide
agtgatccaacaaatt

SEQ ID NO: 5221 - DNA, 16 bp, Artificial sequence
  Synthetic oligonucleotide
gggcaattcataaaac

SEQ ID NO: 5222 - DNA, 16 bp, Artificial sequence
  Synthetic oligonucleotide
aaggagtaatccgagt

SEQ ID NO: 5223 - DNA, 16 bp, Artificial sequence
  Synthetic oligonucleotide
ggatattatatacatc

SEQ ID NO: 5224 - DNA, 16 bp, Artificial sequence
  Synthetic oligonucleotide
ggttttataaaccggg

SEQ ID NO: 5225 - DNA, 16 bp, Artificial sequence
  Synthetic oligonucleotide
ctgcttacagcccaaa

SEQ ID NO: 5226 - DNA, 16 bp, Artificial sequence
  Synthetic oligonucleotide
agtttctgcttacagc

SEQ ID NO: 5227 - DNA, 16 bp, Artificial sequence
  Synthetic oligonucleotide
agcggagtttctgctt

SEQ ID NO: 5228 - DNA, 16 bp, Artificial sequence
  Synthetic oligonucleotide
ttccggccaaacagcg

SEQ ID NO: 5229 - DNA, 16 bp, Artificial sequence
  Synthetic oligonucleotide
ggagtttccggccaaa

SEQ ID NO: 5230 - DNA, 16 bp, Artificial sequence
  Synthetic oligonucleotide
tcagcggagtttccgg

SEQ ID NO: 5231 - DNA, 16 bp, Artificial sequence
  Synthetic oligonucleotide
tgcagcccaaaggaac

SEQ ID NO: 5232 - DNA, 16 bp, Artificial sequence
  Synthetic oligonucleotide
gtttctgcagcccaaa

SEQ ID NO: 5233 - DNA, 16 bp, Artificial sequence
  Synthetic oligonucleotide
gcggagtttctgcagc

SEQ ID NO: 5234 - DNA, 16 bp, Artificial sequence
  Synthetic oligonucleotide
ctttcagatgaaaggg

SEQ ID NO: 5235 - DNA, 16 bp, Artificial sequence
  Synthetic oligonucleotide
tctacagttggtggcc

SEQ ID NO: 5236 - DNA, 16 bp, Artificial sequence
  Synthetic oligonucleotide
gatattatatacatct

SEQ ID NO: 5237 - DNA, 16 bp, Artificial sequence
  Synthetic oligonucleotide
aataggttttataaac

SEQ ID NO: 5238 - DNA, 16 bp, Artificial sequence
  Synthetic oligonucleotide
gtctttccagtttatt

SEQ ID NO: 5239 - DNA, 16 bp, Artificial sequence
  Synthetic oligonucleotide
tgtccattgcccacga

SEQ ID NO: 5240 - DNA, 16 bp, Artificial sequence
  Synthetic oligonucleotide
gtgtccattgcccacg

SEQ ID NO: 5241 - DNA, 16 bp, Artificial sequence
  Synthetic oligonucleotide
tctgccagagatcagt

SEQ ID NO: 5242 - DNA, 16 bp, Artificial sequence
  Synthetic oligonucleotide
gttctgccagagatca

SEQ ID NO: 5243 - DNA, 16 bp, Artificial sequence
  Synthetic oligonucleotide
agttctgccagagatc

SEQ ID NO: 5244 - DNA, 16 bp, Artificial sequence
  Synthetic oligonucleotide
cagttctgccagagat

SEQ ID NO: 5245 - DNA, 16 bp, Artificial sequence
  Synthetic oligonucleotide
acagttctgccagaga

SEQ ID NO: 5246 - DNA, 16 bp, Artificial sequence
  Synthetic oligonucleotide
cagactgcagccattc

SEQ ID NO: 5247 - DNA, 16 bp, Artificial sequence
  Synthetic oligonucleotide
gacagactgcagccat

SEQ ID NO: 5248 - DNA, 16 bp, Artificial sequence
  Synthetic oligonucleotide
ggacagactgcagcca

SEQ ID NO: 5249 - DNA, 16 bp, Artificial sequence
  Synthetic oligonucleotide
gcagaagaacaggaac

SEQ ID NO: 5250 - DNA, 16 bp, Artificial sequence
  Synthetic oligonucleotide
tggcagaagaacagga

SEQ ID NO: 5251 - DNA, 16 bp, Artificial sequence
  Synthetic oligonucleotide
ccagtgatgtaaaacc

SEQ ID NO: 5252 - DNA, 16 bp, Artificial sequence
  Synthetic oligonucleotide
tccagtgatgtaaaac

SEQ ID NO: 5253 - DNA, 16 bp, Artificial sequence
  Synthetic oligonucleotide
acgcacagaccagcaa

SEQ ID NO: 5254 - DNA, 16 bp, Artificial sequence
  Synthetic oligonucleotide
cacgcacagaccagca

SEQ ID NO: 5255 - DNA, 16 bp, Artificial sequence
  Synthetic oligonucleotide
atcacgcacagaccag

SEQ ID NO: 5256 - DNA, 16 bp, Artificial sequence
  Synthetic oligonucleotide
tcatcacgcacagacc

SEQ ID NO: 5257 - DNA, 16 bp, Artificial sequence
  Synthetic oligonucleotide
ctcatcacgcacagac

SEQ ID NO: 5258 - DNA, 16 bp, Artificial sequence
  Synthetic oligonucleotide
gggctagctctttttt

SEQ ID NO: 5259 - DNA, 16 bp, Artificial sequence
  Synthetic oligonucleotide
acatcttcaatcaaca

SEQ ID NO: 5260 - DNA, 16 bp, Artificial sequence
  Synthetic oligonucleotide
tacatcttcaatcaac

SEQ ID NO: 5261 - DNA, 16 bp, Artificial sequence
  Synthetic oligonucleotide
atacatcttcaatcaa

SEQ ID NO: 5262 - DNA, 16 bp, Artificial sequence
  Synthetic oligonucleotide
tatatacatcttcaat

SEQ ID NO: 5263 - DNA, 16 bp, Artificial sequence
  Synthetic oligonucleotide
ttatatacatcttcaa

SEQ ID NO: 5264 - DNA, 16 bp, Artificial sequence
  Synthetic oligonucleotide
attatatacatcttca

SEQ ID NO: 5265 - DNA, 16 bp, Artificial sequence
  Synthetic oligonucleotide
tattatatacatcttc

SEQ ID NO: 5266 - DNA, 16 bp, Artificial sequence
  Synthetic oligonucleotide
agatattatatacatc

SEQ ID NO: 5267 - DNA, 16 bp, Artificial sequence
  Synthetic oligonucleotide
gttataaataggtttt

SEQ ID NO: 5268 - DNA, 16 bp, Artificial sequence
  Synthetic oligonucleotide
tgttataaataggttt

SEQ ID NO: 5269 - DNA, 16 bp, Artificial sequence
  Synthetic oligonucleotide
aagtgttataaatagg

SEQ ID NO: 5270 - DNA, 16 bp, Artificial sequence
  Synthetic oligonucleotide
aaagtgttataaatag

SEQ ID NO: 5271 - DNA, 16 bp, Artificial sequence
  Synthetic oligonucleotide
gtaaaaagtgttataa

SEQ ID NO: 5272 - DNA, 16 bp, Artificial sequence
  Synthetic oligonucleotide
tgtaaaaagtgttata

SEQ ID NO: 5273 - DNA, 16 bp, Artificial sequence
  Synthetic oligonucleotide
atgtaaaaagtgttat

SEQ ID NO: 5274 - DNA, 16 bp, Artificial sequence
  Synthetic oligonucleotide
tatgtaaaaagtgtta

SEQ ID NO: 5275 - DNA, 16 bp, Artificial sequence
  Synthetic oligonucleotide
atatgtaaaaagtgtt

SEQ ID NO: 5276 - DNA, 16 bp, Artificial sequence
  Synthetic oligonucleotide
tatatgtaaaaagtgt

SEQ ID NO: 5277 - DNA, 16 bp, Artificial sequence
  Synthetic oligonucleotide
gtcaacataaaaagca

SEQ ID NO: 5278 - DNA, 16 bp, Artificial sequence
  Synthetic oligonucleotide
gttaggatgtaaagtt

SEQ ID NO: 5279 - DNA, 16 bp, Artificial sequence
  Synthetic oligonucleotide
tgcactgggtcaccca

SEQ ID NO: 5280 - DNA, 16 bp, Artificial sequence
  Synthetic oligonucleotide
ctgatgctccgaccgt

SEQ ID NO: 5281 - DNA, 16 bp, Artificial sequence
  Synthetic oligonucleotide
ttggaggcacagaaca

SEQ ID NO: 5282 - DNA, 16 bp, Artificial sequence
  Synthetic oligonucleotide
ccttggaggcacagaa

SEQ ID NO: 5283 - DNA, 16 bp, Artificial sequence
  Synthetic oligonucleotide
tccttggaggcacaga

SEQ ID NO: 5284 - DNA, 16 bp, Artificial sequence
  Synthetic oligonucleotide
agtccttggaggcaca

SEQ ID NO: 5285 - DNA, 16 bp, Artificial sequence
  Synthetic oligonucleotide
acagtccttggaggca

SEQ ID NO: 5286 - DNA, 16 bp, Artificial sequence
  Synthetic oligonucleotide
gacagtccttggaggc

SEQ ID NO: 5287 - DNA, 16 bp, Artificial sequence
  Synthetic oligonucleotide
cagacagtccttggag

SEQ ID NO: 5288 - DNA, 16 bp, Artificial sequence
  Synthetic oligonucleotide
gccagacagtccttgg

SEQ ID NO: 5289 - DNA, 16 bp, Artificial sequence
  Synthetic oligonucleotide
ggccaatacaagtcat

SEQ ID NO: 5290 - DNA, 16 bp, Artificial sequence
  Synthetic oligonucleotide
tggccaatacaagtca

SEQ ID NO: 5291 - DNA, 16 bp, Artificial sequence
  Synthetic oligonucleotide
ggtggccaatacaagt

SEQ ID NO: 5292 - DNA, 16 bp, Artificial sequence
  Synthetic oligonucleotide
tggtggccaatacaag

SEQ ID NO: 5293 - DNA, 16 bp, Artificial sequence
  Synthetic oligonucleotide
ttggtggccaatacaa

SEQ ID NO: 5294 - DNA, 16 bp, Artificial sequence
  Synthetic oligonucleotide
gttggtggccaataca

SEQ ID NO: 5295 - DNA, 16 bp, Artificial sequence
  Synthetic oligonucleotide
cagttggtggccaata

SEQ ID NO: 5296 - DNA, 16 bp, Artificial sequence
  Synthetic oligonucleotide
tacagttggtggccaa

SEQ ID NO: 5297 - DNA, 16 bp, Artificial sequence
  Synthetic oligonucleotide
ctacagttggtggcca

SEQ ID NO: 5298 - DNA, 16 bp, Artificial sequence
  Synthetic oligonucleotide
catctacagttggtgg

SEQ ID NO: 5299 - DNA, 16 bp, Artificial sequence
  Synthetic oligonucleotide
acatctacagttggtg

SEQ ID NO: 5300 - DNA, 16 bp, Artificial sequence
  Synthetic oligonucleotide
tacatctacagttggt

SEQ ID NO: 5301 - DNA, 16 bp, Artificial sequence
  Synthetic oligonucleotide
tatacatctacagttg

SEQ ID NO: 5302 - DNA, 16 bp, Artificial sequence
  Synthetic oligonucleotide
atatacatctacagtt

SEQ ID NO: 5303 - DNA, 16 bp, Artificial sequence
  Synthetic oligonucleotide
tcttagtccacacagt

SEQ ID NO: 5304 - DNA, 16 bp, Artificial sequence
  Synthetic oligonucleotide
gagttactctgatgtt

SEQ ID NO: 5305 - DNA, 16 bp, Artificial sequence
  Synthetic oligonucleotide
tatatacatctacagt

SEQ ID NO: 5306 - DNA, 16 bp, Artificial sequence
  Synthetic oligonucleotide
tcttagcatcagaagg

SEQ ID NO: 5307 - DNA, 16 bp, Artificial sequence
  Synthetic oligonucleotide
agtcttagcatcagaa

SEQ ID NO: 5308 - DNA, 16 bp, Artificial sequence
  Synthetic oligonucleotide
gagtcttagcatcaga

SEQ ID NO: 5309 - DNA, 16 bp, Artificial sequence
  Synthetic oligonucleotide
tggagtcttagcatca

SEQ ID NO: 5310 - DNA, 16 bp, Artificial sequence
  Synthetic oligonucleotide
ctggagtcttagcatc

SEQ ID NO: 5311 - DNA, 16 bp, Artificial sequence
  Synthetic oligonucleotide
tctggagtcttagcat

SEQ ID NO: 5312 - DNA, 16 bp, Artificial sequence
  Synthetic oligonucleotide
gtctggagtcttagca

SEQ ID NO: 5313 - DNA, 16 bp, Artificial sequence
  Synthetic oligonucleotide
aggtctggagtcttag

SEQ ID NO: 5314 - DNA, 16 bp, Artificial sequence
  Synthetic oligonucleotide
aaaggtctggagtctt

SEQ ID NO: 5315 - DNA, 16 bp, Artificial sequence
  Synthetic oligonucleotide
agttggtataaaatca

SEQ ID NO: 5316 - DNA, 16 bp, Artificial sequence
  Synthetic oligonucleotide
cagttggtataaaatc

SEQ ID NO: 5317 - DNA, 16 bp, Artificial sequence
  Synthetic oligonucleotide
acagttggtataaaat

SEQ ID NO: 5318 - DNA, 16 bp, Artificial sequence
  Synthetic oligonucleotide
cacagttggtataaaa

SEQ ID NO: 5319 - DNA, 16 bp, Artificial sequence
  Synthetic oligonucleotide
acacagttggtataaa

SEQ ID NO: 5320 - DNA, 16 bp, Artificial sequence
  Synthetic oligonucleotide
ccacacagttggtata

SEQ ID NO: 5321 - DNA, 16 bp, Artificial sequence
  Synthetic oligonucleotide
tccacacagttggtat

SEQ ID NO: 5322 - DNA, 16 bp, Artificial sequence
  Synthetic oligonucleotide
agtccacacagttggt

SEQ ID NO: 5323 - DNA, 16 bp, Artificial sequence
  Synthetic oligonucleotide
ttagtccacacagttg

SEQ ID NO: 5324 - DNA, 16 bp, Artificial sequence
  Synthetic oligonucleotide
cttagtccacacagtt

SEQ ID NO: 5325 - DNA, 16 bp, Artificial sequence
  Synthetic oligonucleotide
catcttagtccacaca

SEQ ID NO: 5326 - DNA, 16 bp, Artificial sequence
  Synthetic oligonucleotide
gcatcttagtccacac

SEQ ID NO: 5327 - DNA, 16 bp, Artificial sequence
  Synthetic oligonucleotide
tgcatcttagtccaca

SEQ ID NO: 5328 - DNA, 16 bp, Artificial sequence
  Synthetic oligonucleotide
tactctgatgtttatt

SEQ ID NO: 5329 - DNA, 16 bp, Artificial sequence
  Synthetic oligonucleotide
ttactctgatgtttat

SEQ ID NO: 5330 - DNA, 16 bp, Artificial sequence
  Synthetic oligonucleotide
tgagttactctgatgt

SEQ ID NO: 5331 - DNA, 16 bp, Artificial sequence
  Synthetic oligonucleotide
gtgagttactctgatg

SEQ ID NO: 5332 - DNA, 16 bp, Artificial sequence
  Synthetic oligonucleotide
tcccctttaacgggaa

SEQ ID NO: 5333 - DNA, 16 bp, Artificial sequence
  Synthetic oligonucleotide
ttcccctttaacggga

SEQ ID NO: 5334 - DNA, 16 bp, Artificial sequence
  Synthetic oligonucleotide
gagtcctggccatggg

SEQ ID NO: 5335 - DNA, 16 bp, Artificial sequence
  Synthetic oligonucleotide
ggagtcctggccatgg

SEQ ID NO: 5336 - DNA, 16 bp, Artificial sequence
  Synthetic oligonucleotide
tggagtcctggccatg

SEQ ID NO: 5337 - DNA, 16 bp, Artificial sequence
  Synthetic oligonucleotide
ctggagtcctggccat

SEQ ID NO: 5338 - DNA, 16 bp, Artificial sequence
  Synthetic oligonucleotide
cttggctggagtcctg

SEQ ID NO: 5339 - DNA, 16 bp, Artificial sequence
  Synthetic oligonucleotide
ccttggctggagtcct

SEQ ID NO: 5340 - DNA, 16 bp, Artificial sequence
  Synthetic oligonucleotide
agccttggctggagtc

SEQ ID NO: 5341 - DNA, 16 bp, Artificial sequence
  Synthetic oligonucleotide
gtttcccagaccccag

SEQ ID NO: 5342 - DNA, 16 bp, Artificial sequence
  Synthetic oligonucleotide
ggtttcccagacccca

SEQ ID NO: 5343 - DNA, 16 bp, Artificial sequence
  Synthetic oligonucleotide
ctggtttcccagaccc

SEQ ID NO: 5344 - DNA, 16 bp, Artificial sequence
  Synthetic oligonucleotide
aggctggtttcccaga

SEQ ID NO: 5345 - DNA, 16 bp, Artificial sequence
  Synthetic oligonucleotide
cactcacgctgacgat

SEQ ID NO: 5346 - DNA, 16 bp, Artificial sequence
  Synthetic oligonucleotide
gcactcacgctgacga

SEQ ID NO: 5347 - DNA, 16 bp, Artificial sequence
  Synthetic oligonucleotide
atgctgtggctttggg

SEQ ID NO: 5348 - DNA, 16 bp, Artificial sequence
  Synthetic oligonucleotide
gatgctgtggctttgg

SEQ ID NO: 5349 - DNA, 16 bp, Artificial sequence
  Synthetic oligonucleotide
ccagatgccacttggg

SEQ ID NO: 5350 - DNA, 16 bp, Artificial sequence
  Synthetic oligonucleotide
gccagatgccacttgg

SEQ ID NO: 5351 - DNA, 16 bp, Artificial sequence
  Synthetic oligonucleotide
ggccagatgccacttg

SEQ ID NO: 5352 - DNA, 16 bp, Artificial sequence
  Synthetic oligonucleotide
tggccagatgccactt

SEQ ID NO: 5353 - DNA, 16 bp, Artificial sequence
  Synthetic oligonucleotide
tctgattgtgaaaata

SEQ ID NO: 5354 - DNA, 16 bp, Artificial sequence
  Synthetic oligonucleotide
gtcattccagaaatag

SEQ ID NO: 5355 - DNA, 16 bp, Artificial sequence
  Synthetic oligonucleotide
tgtcattccagaaata

SEQ ID NO: 5356 - DNA, 16 bp, Artificial sequence
  Synthetic oligonucleotide
atgtcattccagaaat

SEQ ID NO: 5357 - DNA, 16 bp, Artificial sequence
  Synthetic oligonucleotide
gaatgtcattccagaa

SEQ ID NO: 5358 - DNA, 16 bp, Artificial sequence
  Synthetic oligonucleotide
tgaatgtcattccaga

SEQ ID NO: 5359 - DNA, 16 bp, Artificial sequence
  Synthetic oligonucleotide
atgaatgtcattccag

SEQ ID NO: 5360 - DNA, 16 bp, Artificial sequence
  Synthetic oligonucleotide
ttcaaggtcagattcc

SEQ ID NO: 5361 - DNA, 16 bp, Artificial sequence
  Synthetic oligonucleotide
agatttccagaggtgt

SEQ ID NO: 5362 - DNA, 16 bp, Artificial sequence
  Synthetic oligonucleotide
gagatttccagaggtg

SEQ ID NO: 5363 - DNA, 16 bp, Artificial sequence
  Synthetic oligonucleotide
ctgcagccattctggg

SEQ ID NO: 5364 - DNA, 16 bp, Artificial sequence
  Synthetic oligonucleotide
actgcagccattctgg

SEQ ID NO: 5365 - DNA, 16 bp, Artificial sequence
  Synthetic oligonucleotide
agactgcagccattct

SEQ ID NO: 5366 - DNA, 16 bp, Artificial sequence
  Synthetic oligonucleotide
gctatttgggctgctg

SEQ ID NO: 5367 - DNA, 16 bp, Artificial sequence
  Synthetic oligonucleotide
tgctatttgggctgct

SEQ ID NO: 5368 - DNA, 16 bp, Artificial sequence
  Synthetic oligonucleotide
ctgctatttgggctgc

SEQ ID NO: 5369 - DNA, 16 bp, Artificial sequence
  Synthetic oligonucleotide
ctcactgctatttggg

SEQ ID NO: 5370 - DNA, 16 bp, Artificial sequence
  Synthetic oligonucleotide
cctcactgctatttgg

SEQ ID NO: 5371 - DNA, 16 bp, Artificial sequence
  Synthetic oligonucleotide
acctcactgctatttg

SEQ ID NO: 5372 - DNA, 16 bp, Artificial sequence
  Synthetic oligonucleotide
taacctcactgctatt

SEQ ID NO: 5373 - DNA, 16 bp, Artificial sequence
  Synthetic oligonucleotide
ctaacctcactgctat

1. An oligomeric compound, comprising a modified oligonucleotide consisting of 12 to 50 linked nucleosides wherein the nucleobase sequence of the modified oligonucleotide is at least 90% complementary to an equal length portion of a PMP22 RNA, and wherein the modified oligonucleotide comprises at least one modification selected from a modified sugar, a sugar surrogate, and a modified internucleoside linkage.

2. An oligomeric compound comprising a modified oligonucleotide consisting of 12 to 50 linked nucleosides and having a nucleobase sequence comprising at least 12, 13, 14, 15, or 16 nucleobases of any of SEQ ID NOS: 37-5373.

3. An oligomeric compound comprising a modified oligonucleotide consisting of 12 to 50 linked nucleosides and having a nucleobase sequence complementary to at least 8, at least 9, at least 10, at least 11, at least 12, at least 13, at least 14, at least 15, at least 16, at least 17, at least 18, at least 19, or at least 20 contiguous nucleobases of:
an equal length portion of nucleobases 4,169-4,198 of SEQ ID NO: 2;
an equal length portion of nucleobases 8,812-8,907 of SEQ ID NO: 2;
an equal length portion of nucleobases 10,019-10,050 of SEQ ID NO: 2;
an equal length portion of nucleobases 11,247-11,276 of SEQ ID NO: 2;
an equal length portion of nucleobases 12,058-12,096 of SEQ ID NO: 2;
an equal length portion of nucleobases 12,357-13,387 of SEQ ID NO: 2;
an equal length portion of nucleobases 15,721-15,769 of SEQ ID NO: 2;
an equal length portion of nucleobases 15,914-15,971 of SEQ ID NO: 2;
an equal length portion of nucleobases 17,354-17,403 of SEQ ID NO: 2;
an equal length portion of nucleobases 19,959-19,997 of SEQ ID NO: 2;
an equal length portion of nucleobases 27,054-27,086 of SEQ ID NO: 2;
an equal length portion of nucleobases 29,734-29,761 of SEQ ID NO: 2;
an equal length portion of nucleobases 30,528-30,558 of SEQ ID NO: 2;
an equal length portion of nucleobases 30,678-30,717 of SEQ ID NO: 2;
an equal length portion of nucleobases 31,450-31,479 of SEQ ID NO: 2;
an equal length portion of nucleobases 37,363-37,401 of SEQ ID NO: 2;
an equal length portion of nucleobases 37,651-37,856 of SEQ ID NO: 2; or
an equal length portion of nucleobases 38,107-38,223 of SEQ ID NO: 2.

4. The oligomeric compound of any of claims 1-3, wherein the modified oligonucleotide has a nucleobase sequence that is at least 80%, 85%, 90%, 95%, or 100% complementary to any of the nucleobase sequences of SEQ ID NO: 1-8 when measured across the entire nucleobase sequence of the modified oligonucleotide.

5. The oligomeric compound of any of claims 1-4, wherein the modified oligonucleotide comprises at least one modified nucleoside.

6. The oligomeric compound of claim 5, wherein the modified oligonucleotide comprises at least one modified nucleoside comprising a modified sugar moiety.

7. The oligomeric compound of claim 6, wherein the modified oligonucleotide comprises at least one modified nucleoside comprising a bicyclic sugar moiety.

8. The oligomeric compound of claim 7, wherein the modified oligonucleotide comprises at least one modified nucleoside comprising a bicyclic sugar moiety having a 2′-4′ bridge, wherein the 2′-4′ bridge is selected from —O—CH₂—; and —O—CH(CH₃)—.

9. The oligomeric compound of any of claims 5-8, wherein the modified oligonucleotide comprises at least one modified nucleoside comprising a non-bicyclic modified sugar moiety.

10. The oligomeric compound of claim 9, wherein the modified oligonucleotide comprises at least one modified nucleoside comprising a non-bicyclic modified sugar moiety comprising a 2′-MOE modified sugar or 2′-OMe modified sugar.

11. The oligomeric compound of any of claims 5-10, wherein the modified oligonucleotide comprises at least one modified nucleoside comprising a sugar surrogate.

12. The oligomeric compound of claim 11, wherein the modified oligonucleotide comprises at least one modified nucleoside comprising a sugar surrogate selected from morpholino and PNA.

13. The oligomeric compound of any of claims 1-12, wherein the modified oligonucleotide has a sugar motif comprising:
a 5′-region consisting of 1-5 linked 5′-region nucleosides;
a central region consisting of 6-10 linked central region nucleosides; and
a 3′-region consisting of 1-5 linked 3′-region nucleosides; wherein
each of the 5′-region nucleosides and each of the 3′-region nucleosides comprises a modified sugar moiety and each of the central region nucleosides comprises a 2′-β-D-deoxyribosyl sugar moiety.

14. The oligomeric compound of claim 13, wherein the modified oligonucleotide has
a 5′-region consisting of 3 linked 5′-region nucleosides;
a central region consisting of 10 linked central region nucleosides; and
a 3′-region consisting of 3 linked 3′-region nucleosides; wherein
each of the 5′-region nucleosides and each of the 3′-region nucleosides comprises a cEt modified sugar moiety and each of the central region nucleosides comprises a 2′-β-D-deoxyribosyl sugar moiety.

15. The oligomeric compound of any of claims 1-14, wherein the modified oligonucleotide comprises at least one modified internucleoside linkage.

16. The oligomeric compound of claim 15, wherein each internucleoside linkage of the modified oligonucleotide is a modified internucleoside linkage.

17. The oligomeric compound of claim 15 or 16 wherein at least one internucleoside linkage is a phosphorothioate internucleoside linkage.

18. The oligomeric compound of claim 15 or 17 wherein the modified oligonucleotide comprises at least one phosphodiester internucleoside linkage.

19. The oligomeric compound of any of claim 15, 17, or 18, wherein each internucleoside linkage is independently selected from a phosphodiester internucleoside linkage or a phosphorothioate internucleoside linkage.

20. The oligomeric compound of any of claims 1-19, wherein the modified oligonucleotide comprises a modified nucleobase.

21. The oligomeric compound of claim 20, wherein the modified nucleobase is a 5-methyl cytosine.

22. The oligomeric compound of any of claims 1-21, wherein the modified oligonucleotide consists of 12-30, 12-22, 12-20,14-18, 14-20, 15-17, 15-25, 16-20, 18-22 or 18-20 linked nucleosides.

23. The oligomeric compound of any of claims 1-22, wherein the modified oligonucleotide consists of 16 linked nucleosides.

24. The oligomeric compound of any of claims 1-23, consisting of the modified oligonucleotide.

25. The oligomeric compound of any of claims 1-24, comprising a conjugate group comprising a conjugate moiety and a conjugate linker.

26. The oligomeric compound of claims 25-26, wherein the conjugate linker consists of a single bond.

27. The oligomeric compound of claims 25-26, wherein the conjugate linker is cleavable.

28. The oligomeric compound of claims 25-26, wherein the conjugate linker comprises 1-3 linker-nucleosides.

29. The oligomeric compound of any of claims 25-28, wherein the conjugate group is attached to the modified oligonucleotide at the 5′-end of the modified oligonucleotide.

30. The oligomeric compound of any of claims 25-28, wherein the conjugate group is attached to the modified oligonucleotide at the 3′-end of the modified oligonucleotide.

31. The oligomeric compound of any of claims 1-30, comprising a terminal group.

32. The oligomeric compound of any of claims 1-31 wherein the oligomeric compound is a singled-stranded oligomeric compound.

33. The oligomeric compound of any of claim 1-27 or 29-32, wherein the oligomeric compound does not comprise linker-nucleosides.

34. An oligomeric duplex comprising an oligomeric compound of any of claim 1-23, 25-31, or 33.

35. An antisense compound comprising or consisting of an oligomeric compound of any of claims 1-33 or an oligomeric duplex of claim 34.

36. A pharmaceutical composition comprising an oligomeric compound of any of claims 1-34 or an oligomeric duplex of claim 35 and a pharmaceutically acceptable carrier or diluent.

37. The pharmaceutical composition of claim 36, wherein the pharmaceutically acceptable diluent is phosphate buffered saline.

38. The pharmaceutical composition of claim 37, wherein the pharmaceutical composition consists essentially of the modified oligonucleotide and phosphate buffered saline.

39. A method comprising administering to an animal a pharmaceutical composition of any of claims 36-38.

40. A method of treating a disease associated with PMP22 comprising administering to an individual having or at risk for developing a disease associated with PMP22 a therapeutically effective amount of a pharmaceutical composition according to any of claims 36-38; and thereby treating the disease associated with PMP22.

41. The method of embodiment 40, wherein the PMP2-associated disease is Dejerine-Sottas Syndrome.

42. The method of claim 40, wherein the PMP2-associated disease is Charcot-Marie-Tooth disease.

43. The method of claim 42, wherein the Charcot-Marie-Tooth disease is CMT1A.

44. The method of claim 42, wherein the Charcot-Marie-Tooth disease is CMT1E.

45. The method of any of claims 40-44, wherein at least one symptom or hallmark of the PMP22-associated disease is ameliorated.

46. The method of claim 45, wherein the symptom or hallmark is demyelination, progressive axonal damage and/or loss, weakness and wasting of foot and lower leg muscles, foot deformities, and weakness and atrophy in the hands.
